(19) United States
(12) Patent Application Publication
(10) Pub. No.: US 2024/0122864 A1
(43) Pub. Date: Apr. 18, 2024

(54) PARTICLES ENCAPSULATING FUSION PROTEINS CONTAINING LINKED EPITOPES

(71) Applicant: COUR PHARMACEUTICALS DEVELOPMENT COMPANY INC., Skokie, IL (US)

(72) Inventor: Daniel R Getts, Northbrook, IL (US)

(21) Appl. No.: 18/333,103

(22) Filed: Jun. 12, 2023

Related U.S. Application Data
(63) Continuation of application No. 16/067,867, filed on Jul. 3, 2018, now abandoned.
(60) Provisional application No. 62/274,711, filed on Jan. 4, 2016.

(51) Int. Cl. A61K 9/50; A61K 39/00; A61P 35/00

(52) U.S. Cl. CPC A61K 9/5031; A61K 39/0007; A61K 39/0008; A61K 39/001186; A61K 39/001188; A61P 35/00; A61K 2039/55555; A61K 2039/572; A61K 2039/70

(57) ABSTRACT

The present invention provides compositions comprising biodegradable particles that encapsulate two or more epitopes linked together by one or more linkers that are susceptible to cleavage by specific proteases. The present invention further provides methods for inducing antigen-specific tolerance and protective immune responses and for the treatment inflammatory diseases, such as autoimmune diseases, allergies, cancers, or infectious diseases.

### CROSS-REFERENCE TO RELATED APPLICATIONS

[0001] This application claims priority to U.S. Provisional Application No. 62/274,711, filed Jan. 4, 2016, the content of which is incorporated herein by reference in its entirety.

### DESCRIPTION OF THE TEXT FILE SUBMITTED ELECTRONICALLY

[0002] The contexts of the text file submitted electronically herewith are incorporated herein by reference in their entirety: A computer-readable format copy of the Sequence Listing (file name: COUR-013_01WO_Seglist.txt, date recorded: Jan. 4, 2016, file size: 1.17 megabytes)

### BACKGROUND OF THE INVENTION

[0003] Inflammatory diseases and disorders are conditions in which an abnormal or otherwise deregulated inflammatory response contributes to the etiology or severity of disease and encompass a wide range of maladies including autoimmune diseases, allergies, cancers, and infections.

[0004] Conventional clinical strategies for general long-term immunosuppression in disorders associated with an undesired immune response are based on the long-term administration of broad acting immunosuppressive drugs, for example, signal 1 blockers such as cyclosporin A (CsA), FK506 (tacrolimus) and corticosteroids. However, these drugs often require high doses in order to achieve the desired efficacy and long-term use often results in toxic side-effects. Moreover, even in patients that tolerate these drugs, the requirement for life-long immunosuppressive drug therapy carries a significant risk of severe side effects, nephrotoxicity, and metabolic disorders. Further, general, non-specific immune suppression inhibits both pathological (e.g., autoreactive) and beneficial immune responses, such as those elicited against cancerous cells and infectious agents. As a result, patients undergoing immunosuppressive treatments are at increased risk for the development of various cancers and contraction of serious infections.

[0005] Similarly, cancer therapeutics generally result in broad, non-specific immune activation in attempts to eradicate cancerous cells. However, these broad activation strategies result in damage to healthy, non-cancerous or non-malignant tissue and even death. Therefore, there exists a need in the art for improved therapeutics that can effectively regulate immune responses in an antigen-specific manner. Such therapeutics would allow for the targeted treatment of inflammatory diseases, such as autoimmune diseases and cancer, thereby minimizing the negative side effects associated with broad, non-specific activation or inhibition of the immune system.

[0006] Methods of inducing antigen-specific tolerance have been developed, including cell coupling of an antigen or peptide. For example, in one method, peptide-induced, cell-coupled tolerance involves collection, separation, and treatment of peripheral blood cells with disease specific autoantigens and the coupling reagent ethylene carbodimide (ECDI) under sterile conditions. These peptide-coupled cells are subsequently re-infused into the donor/patient. This process is costly and must be conducted under closely monitored conditions by skilled practitioners and is limited in the number of centers that can conduct the procedure. Although the use of red blood cells as the donor cell type expands the potential source to include allogeneic donors, dramatically increases the supply of source cells, and potentially expands the number of suitable delivery centers to include any setting certified for blood transfusion, significant drawbacks remain including a limited supply of source cells and necessity for blood-type matching to minimize immune response to the donor cells.

[0007] Recently, peptide-coupled particles have been described which eliminate the requirement for a supply of source cells and circumvents the tissue-typing requirement of the prior approaches (See U.S. Patent Publication No. 2012-0076831, incorporated by reference herein in its entirety). Notwithstanding, the use of antigens coupled to the outside of particles is associated with increased anaphylaxis and has significant chemistry, manufacturing and control issues. However, when an antigen is encapsulated within the particle, these adverse events can be avoided. Surprisingly, the size and the charge can be altered to control the phenotype of the immune response elicited, inducing either enhanced tolerogenic or regulatory responses (e.g., in the context of autoimmunity) or enhanced protective immune responses (e.g., in the context of cancer) to specific antigens.

[0008] While particles encapsulating a single epitope or protein have been created, many of disease pathologies are related to multiple proteins. Even further, a single disease may have several immunogenic epitopes within each antigen. For example, multiple sclerosis (MS) is thought to involve inflammatory reactions to multiple sites of several different autologous proteins, including at least proteolipid protein (PLP), myelin oligodendrocyte glycoprotein (MOG), and myelin basic protein (MBP). The primary target antigens, however, are not known for certain. What is more, the target antigens differ between patients and the T cell reactivity to different antigens changes over time in a process known as epitope spreading. Thus in order to ensure coverage of all possible antigenic epitopes that a particular MS patient may be reactive towards at any given point, encapsulation of the entire proteins would be necessary. Given the size and physical properties of these large proteins, however, encapsulation is exceedingly difficult. As such, particles encapsulating multiple epitopes associated with a particular disease would likely increase the therapeutic efficacy of such particles. However, the properties of different proteins, such as solubility or isoelectric point, increase the complexity of manufacturing particles encapsulating more than one protein or epitope, and often result in variable and difficult to control encapsulation efficiencies.

[0009] Further, methods inducing antigen-specific immune activation, for example against tumor antigens, have also been developed, including the use of multiple epitope constructs expressing MAGE3 and HPV in the treatment of squamous cell carcinoma of the head and neck (See U.S. Pat. Nos. 8,263,560 and 7,842,480). Additionally, a multi-epitope system using RNA-lipoplexes that utilizes individual RNA vectors encoding four tumor antigens (NY-ESO-1, MAGE-A3, tyrosinase, and TPTE) encapsulated into liposomes (RNA-LPX) has also been described (See Kranz et al., Nature, V. 534, pp. 396-401, 2016). Administration of these RNA-LPXs induced systemic IFNα responses and amplified T cell responses against the encoded antigens. However, this system does not overcome the challenges associated with encapsulating multiple, independent components into a single particle. Variations in the encapsulation efficiency may result in a disproportionate incorporation of one component over the other. Further, the use of nucleic acid-based vaccines requires the use of endogenous transcription and translation pathways. Each of these factors increases the variability of the system, altering the relative expression of the encoded proteins and decreasing the therapeutic efficacy of the composition. As such, there is a need in the art for compositions and methods that allow for the incorporation of multiple disease epitopes into a single therapeutic composition for use in the treatment of inflammatory diseases, particularly those diseases where multiple epitopes or proteins are involved in pathogenesis.

### SUMMARY OF THE INVENTION

[0010] The present invention provides biodegradable particles that encapsulate two or more epitopes linked together by one or more linkers. The linkers are amino acid sequences that are susceptible to cleavage by specific proteases, allowing for control over antigen presentation by major histocompatibility (MHC)-I or MHC-II and further enhancing control over the resultant immune response. Linking the epitopes into a single protein allows for a particle that can induce tolerance to multiple epitopes that is capable of delivering the epitopes at a controlled ratio to each other. Such particles are useful for ameliorating inflammatory diseases, such as autoimmune diseases or allergies, associated with more than one epitope. Incorporation of immune modulators and agonists, such as TLR agonists also for the use of such particles the treatment of cancers.

[0011] Some aspects of the present invention provide for a biodegradable particle comprising one or more fusion proteins encapsulated therein, wherein each one of the one or more fusion proteins comprises two or more antigenic epitopes, wherein the two or more antigenic epitopes are separated by a linker, wherein the linker comprises an amino acid sequence susceptible to specific cleavage, and wherein said biodegradable particle has a negative zeta potential. In some embodiments, the biodegradable particle has a zeta potential of about −100 mV to about 0 mV. In further embodiments, the biodegradable particle has a zeta potential of about −50 mV to about −40 mV. In further embodiments, the biodegradable particle has a zeta potential of about −75 mV to about −50 mV. In further embodiments, the biodegradable particle has a zeta potential of about −50 mV.

[0012] In some embodiments, the biodegradable particle comprises poly(lactide-co-glycolide) (PLG). In further embodiments, the biodegradable particle comprises PLG with a copolymer ratio of about 50:50 of polylactic acid:polyglycolic acid. In some embodiments, the surface of the biodegradable particle is carboxylated. In further embodiments, the carboxylation is achieved by using poly(ethylene-maleic anhydride) (PEMA), poly-acrylic acid, or sodium cholate.

[0013] In some embodiments, the biodegradable particle has a diameter of between about 0.1 μm to about 10 μm. In some embodiments, the biodegradable particle has a diameter of between about 0.3 μm to about 5 μm. In some embodiments, the biodegradable particle has a diameter of between about 0.5 μm to about 3 μm. In some embodiments, the biodegradable particle has a diameter of between about 0.5 μm to about 1 μm. In some embodiments, the biodegradable particle has a diameter of about 0.5 μm. In some embodiments, the biodegradable particle has a diameter of about 0.6 μm.

[0014] Some aspects of the present invention provide for a biodegradable particle comprising one or more fusion proteins encapsulated therein, wherein each one of the one or more fusion proteins comprises two or more antigenic epitopes, wherein the two or more antigenic epitopes are separated by a linker, and wherein said biodegradable particle has a negative zeta potential. In some embodiments, the linker comprises an amino acid sequence susceptible to specific cleavage by a protease located in the phagolysosome of a cell or a site susceptible to a specific cleavage by a protease located in the cytosol of the cell. In some embodiments, the linker comprises an amino acid sequence susceptible to specific cleavage by a protease located in the phagolysosome of a cell and a site susceptible to a specific cleavage by a protease located in the cytosol of the cell.

[0015] In some embodiments, the site susceptible to specific cleavage by a protease located in the phagolysosome is susceptible to cleavage by a furin or cathepsin protease. In further embodiments, the site susceptible to specific cleavage by a protease located in the phagolysosome is susceptible to cleavage by a furin protease. In further embodiments, the site susceptible to specific cleavage by a protease located in the phagolysosome is susceptible to cleavage by a cathepsin protease. In still further embodiments, the site susceptible to specific cleavage by a protease located in the phagolysosome is one or more of cathepsin A, cathepsin B, cathepsin C, cathepsin D, cathepsin E, cathepsin F, cathepsin G, cathepsin H, cathepsin K, cathepsin L, cathepsin O, cathepsin W, or cathepsin Z. In still further embodiments, the site susceptible to specific cleavage by a protease located in the phagolysosome is cathepsin L.

[0016] In further embodiments, the site susceptible to specific cleavage by a protease located in the cytosol is susceptible to cleavage by a furin or cathepsin protease. In further embodiments, the site susceptible to specific cleavage by a protease located in the cytosol is susceptible to cleavage by cathepsin S. In further embodiments, the amino acid sequence of the linker comprises a site susceptible to specific cleavage by cathepsin L and a site susceptible to a specific cleavage by cathepsin S. In still further embodiments, the amino acid sequence of the linker is Gly-Ala-Val-Val-Arg-Gly-Ala (SEQ ID NO: 5141).

[0017] Some aspects of the present invention provide for a biodegradable particle comprising one or more fusion proteins encapsulated therein, wherein each one of the one or more fusion proteins comprises two or more antigenic epitopes, wherein the two or more antigenic epitopes are separated by a linker, wherein the linker comprises an amino acid sequence susceptible to specific cleavage, and wherein said biodegradable particle has a negative zeta potential. In some embodiments, the two or more antigenic epitopes comprise autoimmune antigens, antigens expressed on a tissue to be transplanted into a subject, antigens derived from an enzyme for enzyme replacement therapy, or antigens derived from an allergen. In further embodiments, the two or more antigenic epitopes each comprise at least a portion of a protein, wherein said portions are from the same protein. In further embodiments, the two or more antigenic epitopes each comprise at least a portion of a protein, wherein said portions are from different proteins. In some embodiments, the different proteins are associated with the same autoimmune disorder, the same tissue to be transplanted into a subject, or the same allergen.

[0018] Some aspects of the present invention provide for a biodegradable particle comprising one or more fusion proteins encapsulated therein, wherein each one of the one or more fusion proteins comprises two or more antigenic epitopes, wherein the two or more antigenic epitopes are separated by a linker, wherein the linker comprises an amino acid sequence susceptible to specific cleavage, and wherein said biodegradable particle has a negative zeta potential. In some embodiments, the two or more antigenic epitopes each comprise at least a portion of a protein selected from the group consisting of: myelin basic protein, acetylcholine receptor, endogenous antigen, myelin oligodendrocyte glycoprotein, pancreatic beta-cell antigen, insulin, glutamic acid decarboxylase (GAD), collagen type 11, human cartilage gp39, fp130-RAPS, proteolipid protein, fibrillarin, small nucleolar protein, thyroid stimulating factor receptor, histones, glycoprotein gp70, pyruvate dehydrogenase dihydrolipoamide acetyltransferase (PCD-E2), hair follicle antigen, A-gliadin, gliadin, insulin, proinsulin, islet specific glucose-6-phosphatase catalytic subunit-related protein (IGRP), human tropomyosin isoform 5, Bahia grass pollen (BaGP), peach allergen Pru p 3, alpha s 1-Caein Milk allergen, Apigl celery allergen, Berel Brazil nut allergen, B-Lactoglobulin Milk allergen, Bovine serum albumin, Cor a 1.04 Hazelnut allergen, myelin associated glycoprotein, aquaporin α3 chain of type IV collagen, Ovalbumin Egg allergen, Advate, antihemophilic factor, Kogenate, Eloctate, recombinant factor VIII Fc fusion protein, Refacto, Novo VIIa, recombinant factor VII, eptacog alfa, Helixate, Monanine, Coagulation Factor IX, Wilate, Ceredase, Alglucerase, Cerezyme, Imiglucerase, Elelso, taliglucerase alfa, Fabrazyme, Agalsidase beta, Aldurazyme, -I-iduronidase, Myozyme, Acid-glucosidase, Elaprase, iduronate-2-sulfatase, Naglazyme arylsufatase B, or N-acetylgalactosamine-4-sulfatase.

[0019] In some embodiments, the two or more antigenic epitopes are selected from the group consisting of SEQ ID NOS: 2-1294. In further embodiments, the two or more antigenic epitopes are selected from the group consisting of SEQ ID NOs: 1295-1724; SEQ ID NOs: 1726-1766; SEQ ID NOs: 4986-5140; and discontinuous epitopes derived from SEQ ID NO: 1725.

[0020] In some embodiments, the two or more antigenic epitopes are selected from the group consisting of SEQ ID NOs: 1767-1840; SEQ ID NOs: 1842-1962; SEQ ID NOs: 1964-2027; SEQ ID NOs: 2029-2073; SEQ ID NOs: 2075-2113; SEQ ID NOs: 2115-2197; SEQ ID NOs: 2199-2248; SEQ ID NOs: 2250-2259; SEQ ID NOs: 2261-2420; SEQ ID NOs: 2422-2486; SEQ ID NOs: 2489-2505; and discontinuous epitopes derived from SEQ ID NOs: 1841, 1963, 2028, 2074, 2114, 2198, 2260, 2249, 2421, 2487, and 2488.

[0021] In some embodiments, the two or more antigenic epitopes are selected from the group consisting of SEQ ID NOs: 2506-3260; SEQ ID NOs: 3262-3693; and discontinuous epitopes derived from 3261. In some embodiments, the two or more antigenic epitopes are selected from the group consisting of SEQ ID NOs: 3694-3857; SEQ ID NOs: 3860-4565; and discontinuous epitopes derived from 3857, 3858, and 3859. In some embodiments, the two or more antigenic epitopes are selected from the group consisting of SEQ ID NOs: 4566-4576; SEQ ID NOs: 4578-4610; SEQ ID NOs: 4612-4613; and SEQ ID NOs: 5018-5039; and discontinuous epitopes derived from 4357, 4577, and 4611.

[0022] In some embodiments, the two or more antigenic epitopes are selected from the group consisting of SEQ ID NOs: 4614-4653. In some embodiments, the two or more antigenic epitopes are selected from the group consisting of SEQ ID NOs: 4654-4694; SEQ ID NOs: 4696-4894; SEQ ID NOs: 4896-4901; and discontinuous epitopes derived from 4695 and 4895. In some embodiments, the two or more antigenic epitopes are selected from the group consisting of SEQ ID NOs: 4902-4906. In some embodiments, the two or more antigenic epitopes are selected from the group consisting of SEQ ID NOs: 4907-4914. In some embodiments, the two or more antigenic epitopes are selected from the group consisting of: SEQ ID NOs: 4915-4917. In some embodiments, the two or more antigenic epitopes are selected from the group consisting of SEQ ID NOs: 4918-4941. In some embodiments, the two or more antigenic epitopes are selected from the group consisting of SEQ ID NOs: 4942-4952. In some embodiments, the two or more antigenic epitopes are selected from the group consisting of SEQ ID NOs: 4953-4963. In some embodiments, the two or more antigenic epitopes are selected from the group consisting of SEQ ID NOs: 4964-4974.

[0023] Some aspects of the present invention provide for a biodegradable particle comprising one or more fusion proteins encapsulated therein, wherein each one of the one or more fusion proteins comprises two or more antigenic epitopes, wherein the two or more antigenic epitopes are separated by a linker, wherein the linker comprises an amino acid sequence susceptible to specific cleavage, and wherein said biodegradable particle has a negative zeta potential. In some embodiments, the two or more antigenic epitopes are derived from a therapeutic antibody, antigen-binding fragment, or Fc fragment thereof. In some embodiments, the antibody or antigen-binding fragment thereof is a monoclonal antibody, a humanized monoclonal antibody, a human monoclonal antibody, a chimeric antibody, a single chain antibody, fragment antigen binding region (Fab), a single chain variable fragment (scFv), small modular immunopharmaceutical (SMIP), or a single antigen-binding domain.

[0024] In further embodiments, the antibody or antigen-binding fragment thereof binds to α4β1 integrin, Bacillus anthracis, B-L gamma S, C5, CD3, CD11a, CD20, CD25, CD30, CD33, CD52, CD59, CTLA4, EGFR, GD2, GPIIb, IIIa, HER2, IgE, IL-1β, IL-5, IL12/23, PCSK9, PD1, RANK, RSV F protein, TNFα, or VEGF-A. In further embodiments, the antibody or antigen-binding fragment thereof is Abciximab, Adalimumab, Adotrastuzumab emtansine, Alemtuzumab, Basiliximab, Bevacizumab, Belimumab, Blinatumomab, Brentuximab Vedotin, Canakinumab, Catumaxomab, Cetuximab, Certolizumab pegol, Daclizumab, Denosumab, Dinutuximab, Eculizumab, Efalizumab, Evolocumab, Gemtuzumab ozogamicin, Golimumab, Ibritumomab tiuxetan, Ipilimumab, Infliximab, Motavizumab, Muromonab, Natalizumab, Nivolumab, Obinutuzumab, Ofatumumab, Omalizumab, Panitumumab, Palivizumab, Pembrolizumab, Pertuzumab, Ramucirumab, Ranibizumab, Raxibacumab, Rituximab, Secukinumab, Siltuximab, Trastuzumab, Tocilizumab, Tositumomab-I-131, Ustekinumab, or Vedolizumab.

[0025] In some aspect of the invention, the two or more antigenic epitopes are derived from a variant of a therapeutic antibody or antigen-binding fragment thereof that lacks functional complementarity determining regions (CDRs). In further aspects, the variant of the antibody or antigen-binding fragment thereof that lacks functional CDRs is a monoclonal antibody, a humanized monoclonal antibody, a human monoclonal antibody, a chimeric antibody, a single chain antibody, fragment antigen binding region (Fab), a single chain variable fragment (scFv), small modular immunopharmaceutical (SMIP), or a single antigen-binding domain.

[0026] Some aspects of the present invention provide for a biodegradable particle comprising one or more fusion proteins encapsulated therein, wherein each one of the one or more fusion proteins comprises two or more antigenic epitopes, wherein the two or more antigenic epitopes are separated by a linker, wherein the linker comprises an amino acid sequence susceptible to specific cleavage, and wherein said biodegradable particle has a negative zeta potential. In some embodiments, one of said one or more fusion proteins comprises the antigenic epitopes MOG₁₋₂₀, MBP₁₃₋₃₂, MOG₃₅₋₅₅, MBP₁₄₆₋₁₇₀, PLP₁₃₉₋₁₅₄, MBP₁₁₁₋₁₂₉, and/or MBP₈₃₋₉₉. In further aspects, one of said one or more fusion proteins comprises the antigenic epitopes SEQ ID NO:1350, SEQ ID NO: 4986, and SEQ ID NO: 4987.

[0027] Some aspects of the present invention provide for a pharmaceutical composition comprising a biodegradable particle described herein. In further aspects, the pharmaceutical composition comprises a pharmaceutically acceptable carrier. In further aspects, the pharmaceutical composition comprises pharmaceutically acceptable excipients.

[0028] Some aspects of the present invention provide for methods of inducing antigen-specific tolerance in a subject comprising administering an effective amount of a biodegradable particle described herein. In some aspects, the method of inducing antigen-specific tolerance in a subject comprises administering to the subject an effective amount of a biodegradable particle comprising one or more fusion proteins encapsulated therein, wherein each one of said one or more fusion proteins comprises two or more antigenic epitopes, wherein said two or more antigenic epitopes are separated by a linker, wherein said linker comprises an amino acid sequence susceptible to specific cleavage, and wherein said biodegradable particle has a negative zeta potential. In some embodiments, the effective amount of the biodegradable particle is administered to the subject orally, intravenously, sublingually, buccally, enterically, topically, rectally, subcutaneously, nasally, intraosseously (i.e., intraosseous infusion), intraperitoneally, intrathecally, transdermally, or transmucosally. In further embodiments, the effective amount of the biodegradable particle is administered to the subject intravenously or subcutaneously. In further embodiments, the effective amount of the biodegradable particle is administered to the subject intravenously. In further embodiments, the effective amount of the biodegradable particle is administered to the subject subcutaneously.

[0029] In some embodiments, an effective amount of a biodegradable particle described herein is administered to the subject to treat or prevent a disease or condition. In some embodiments, the disease or condition is selected from the group consisting of: an autoimmune disease, a lysosomal storage disease, an enzyme deficiency, inflammatory disease, an allergy, transplantation rejection, and a hyper-immune response. In further embodiments, the disease or condition is selected from the group consisting of multiple sclerosis, type 1 diabetes, asthma, a food allergy, an environmental allergy, Celiac disease, inflammatory bowel disease, including Crohn's disease and ulcerative colitis, a mucopolysaccharide storage disorder, gangliosidosis, alkaline hypophosphatasia, cholesterol ester storage disease, hyperuricemia, growth hormone deficiency, renal anemia Hemophilia, Hemophilia A, Hemophilia B, von Willebrand disease, Gaucher's Disease, Fabry's Disease, Hurler's Disease, Pompe's Disease, Hunter's Disease, Maroteaux-Lary Disease and a condition caused by the antigen in the subject to produce an overreaction to the antigen.

[0030] In some embodiments, the disease or condition is multiple sclerosis, wherein each one of said one or more fusion proteins comprises two or more antigenic epitopes selected from the group consisting of SEQ ID NOS: 2-1294.

[0031] In some embodiments, the disease or condition is Celiac disease, wherein each one of said one or more fusion proteins comprises two or more antigenic epitopes selected from the group consisting of SEQ ID NOs: 1295-1724; SEQ ID NOs: 1726-1766; SEQ ID NOs: 4986-5140; and discontinuous epitopes derived from SEQ ID NO: 1725.

[0032] In some embodiments, the disease or condition is Type I Diabetes, wherein each one of said one or more fusion proteins comprises two or more antigenic epitopes selected from the group consisting of SEQ ID NOs: 1767-1840; SEQ ID NOs: 1842-1962; SEQ ID NOs: 1964-2027; SEQ ID NOs: 2029-2073; SEQ ID NOs: 2075-2113; SEQ ID NOs: 2115-2197; SEQ ID NOs: 2199-2248; SEQ ID NOs: 2250-2259; SEQ ID NOs: 2261-2420; SEQ ID NOs: 2422-2486; SEQ ID NOs: 2489-2505; and discontinuous epitopes derived from SEQ ID NOs: 1841, 1963, 2028, 2074, 2114, 2198, 2260, 2249, 2421, 2487, and 2488.

[0033] In some embodiments, the disease or condition is rheumatoid arthritis, wherein each one of said one or more fusion proteins comprises two or more antigenic epitopes selected from the group consisting of SEQ ID NOs 2506-3260; SEQ ID NOs: 3262-3693; and discontinuous epitopes derived from 3261.

[0034] In some embodiments, the disease or condition is systemic lupus, wherein each one of said one or more fusion proteins comprises two or more antigenic epitopes selected from the group consisting of SEQ ID NOs 3694-3857; SEQ ID NOs: 3860-4565; and discontinuous epitopes derived from 3857, 3858, and 3859.

[0035] In some embodiments, the disease or condition is Good Pasture's syndrome, wherein each one of said one or more fusion proteins comprises two or more antigenic epitopes selected from the group consisting of SEQ ID NOs: 4566-4576; SEQ ID NOs: 4578-4610; SEQ ID NOs: 4612-4613; and SEQ ID NOs: 5018-5039; and discontinuous epitopes derived from 4357, 4577, and 4611.

[0036] In some embodiments, the disease or condition is uveitis, wherein each one of said one or more fusion proteins comprises two or more antigenic epitopes selected from the group consisting of SEQ ID NOs: 4614-4653.

[0037] In some embodiments, the disease or condition is thyroiditis, wherein each one of said one or more fusion proteins comprises two or more antigenic epitopes selected from the group consisting of SEQ ID NOs: 4654-4694; SEQ ID NOs: 4696-4894; SEQ ID NOs: 4896-4901; and discontinuous epitopes derived from 4695 and 4895.

[0038] In some embodiments, the disease or condition is myositis, wherein each one of said one or more fusion proteins comprises two or more antigenic epitopes selected from the group consisting of SEQ ID NOs: 4902-4906.

[0039] In some embodiments, the disease or condition is vasculitis, wherein each one of said one or more fusion proteins comprises two or more antigenic epitopes selected from the group consisting of SEQ ID NOs: 4907-4914.

[0040] In some embodiments, the disease or condition is pancreatitis, wherein each one of said one or more fusion proteins comprises two or more antigenic epitopes selected from the group consisting of SEQ ID NOs: 4915-4917.

[0041] In some embodiments, the disease or condition is Crohn's disease, wherein each one of said one or more fusion proteins comprises two or more antigenic epitopes selected from the group consisting of SEQ ID NOs: 4918-4941.

[0042] In some embodiments, the disease or condition is ulcerative colitis, wherein each one of said one or more fusion proteins comprises two or more antigenic epitopes selected from the group consisting of SEQ ID NOs: 4942-4952.

[0043] In some embodiments, the disease or condition is psoriasis, wherein each one of said one or more fusion proteins comprises two or more antigenic epitopes selected from the group consisting of SEQ ID NOs: 4953-4963.

[0044] In some embodiments, the disease or condition is reactive arthritis, wherein each one of said one or more fusion proteins comprises two or more antigenic epitopes selected from the group consisting of SEQ ID NOs: 4964-4974.

[0045] Some aspects of the present invention provide methods for decreasing inhibitory neutrophil accumulation in a subject comprising administering to the subject an effective amount of a biodegradable particle described herein. In some embodiments, the subject has cancer. In some embodiments, the two or more antigenic epitopes each comprise at least a portion of a protein selected from the group consisting of CD19, CD20, BCMA, CD22, CLL1, CD33, CEA, CD123, CS1, EGFR, PSMA, EphA2, MCSP, ADAM17, PSCA, TPTE, HPU16, immature laminin receptor, TAG-72, HPV E6, HPV E7, BING-4, Calcium-activated chloride channel 2, cyclin B₁, 9D7, Ep-CAM, EphA3, Her2/neu, telomerase, mesothelin, SAP-1, survivin, proteins of the BAGE family, proteins of the CAGE family, proteins of the GAGE family, proteins of the MAGE family (e.g., MAGE-A3), proteins of the SAGE family, proteins of the RAGE family, CT9, CT10, NY-ESO1/LAGE-1, PRAME, SSX-2, Melan-A/MART-1, Cp100/pmel17, tyrosinase, TRP-1/TRP-2, P.polypeptide, MC1R, prostate-specific antigen, β-catenin, BRCA1/2, CDK4, CML66, fibronectin, MART-2, p53, Ras, TGF-βRII, and MUC1.

[0046] Some aspects of the present invention provide methods for increasing tissue regeneration in a subject comprising administering to the subject an effective amount of a biodegradable particle comprising one or more fusion proteins encapsulated therein, wherein each one of the one or more fusion proteins comprises two or more antigenic epitopes, wherein the two or more antigenic epitopes are separated by a linker, wherein the linker comprises an amino acid sequence susceptible to specific cleavage, and wherein said biodegradable particle has a negative zeta potential. In some embodiments, the particles increase epithelial cell regeneration in a colitis patient. In further embodiments, each of the one or more fusion proteins encapsulated by the particle comprises two or more antigenic epitopes selected from the group consisting of SEQ ID NOs: 4918-4941 and SEQ ID NOs: 4942-4952. In some embodiments, the particles increase re-myelination in a multiple sclerosis patient. In further embodiments, each of the one or more fusion proteins encapsulated by the particle comprises two or more antigenic epitopes derived from myelin basic protein and/or myelin oligodendrocyte glycoprotein. In further embodiments, each of said the or more fusion proteins encapsulated by the particle comprises two or more antigenic epitopes selected from the group consisting of: SEQ ID NOS: 2-1294.

[0047] Some aspects of the present invention provide methods for reducing the incidence and/or severity of an immune response to a therapeutic protein by a subject comprising administering to the subject an effective amount of a biodegradable particle comprising one or more fusion proteins encapsulated therein, wherein each one of the one or more fusion proteins comprises two or more antigenic epitopes, wherein the two or more antigenic epitopes are separated by a linker, wherein the linker comprises an amino acid sequence susceptible to specific cleavage, and wherein said biodegradable particle has a negative zeta potential. In some embodiments, the subject is undergoing enzyme replacement therapy for treatment of a disease selected from the group consisting of Hemophilia, Hemophilia A, Hemophilia B, von Willebrand disease, Gaucher's Disease, Fabry's Disease, Hurler's Disease, Pompe's Disease, Hunter's Disease, a mucopolysaccharide storage disorder, gangliosidosis, alkaline hypophosphatasia, cholesterol ester storage disease, hyperuricemia, growth hormone deficiency, renal anemia and Maroteaux-Lary Disease.

[0048] In further embodiments, the antigenic epitopes comprise one or more enzyme selected from the group consisting of Advate, antihemophilic factor, Kogenate, Eloctate, recombinant factor VIII Fc fusion protein, Refacto, Novo VIIa, recombinant factor VII, eptacog alfa, Helixate, Monanine, Coagulation Factor IX, Wilate, Ceredase, Alglucerase, Cerezyme, Imiglucerase, Elelso, taliglucerase alfa, Fabrazyme, Agalsidase beta, Aldurazyme, -I-iduronidase, Myozyme, Acid-glucosidase, Elaprase, iduronate-2-sulfatase, Naglazyme arylsufatase B, and N-acetylgalactosamine-4-sulfatase. In further embodiments, the antigenic epitopes comprise one or more protein selected from the group consisting of interferon-alpha, interferon-alpha 2a, interferon-beta Ib, interferon-beta Ia, insulin, DNAase, Neupogen, Epogen, Procrit (Epotein Alpha), Aranesp (2nd Generation Procrit), Intron A (interferon-alpha 2b), IL-2 (Proleukin), IL-I ra, BMP-7, TNF-alpha Ia, tPA, PDGF, interferon-gamma Ib, uPA, GMCSF, Factor VII, Factor VIII, Betaferon (interferon beta-Ia), somatotropin, and Rebif (interferon beta Ia).

[0049] In some embodiments, the therapeutic protein is an antibody, antigen-binding fragment, or Fc fragment thereof. In further embodiments, the antibody, antigen-binding fragment, or Fc fragment thereof is wherein the antibody or antigen-binding fragment thereof is Abciximab, Adalimumab, Adotrastuzumab emtansine, Alemtuzumab, Basiliximab, Bevacizumab, Belimumab, Blinatumomab, Brentuximab Vedotin, Canakinumab, Catumaxomab, Cetuximab, Certolizumab pegol, Daclizumab, Denosumab, Dinutuximab, Eculizumab, Efalizumab, Evolocumab, Gemtuzumab ozogamicin, Golimumab, Ibritumomab tiuxetan, Ipilimumab, Infliximab, Motavizumab, Muromonab, Natalizumab, Nivolumab, Obinutuzumab, Ofatumumab, Omalizumab, Panitumumab, Palivizumab, Pembrolizumab, Pertuzumab, Ramucirumab, Ranibizumab, Raxibacumab, Rituximab, Secukinumab, Siltuximab, Trastuzumab, Tocilizumab, Tositumomab-I-131, Ustekinumab, or Vedolizumab.

[0050] Some aspects of the present invention provide methods for increasing or inducing a protective immune response in a subject comprising administering an effective amount of a biodegradable particle described herein. In some embodiments, the method comprises administering to the subject an effective amount of a biodegradable particle comprising one or more fusion proteins encapsulated therein, wherein each one of the one or more fusion proteins comprises two or more antigenic epitopes, wherein the two or more antigenic epitopes are separated by a linker, wherein the linker comprises an amino acid sequence susceptible to specific cleavage, and wherein said biodegradable particle has a negative zeta potential. In some embodiments, the biodegradable particle is administered to the subject orally, intravenously, sublingually, buccally, enterically, topically, rectally, subcutaneously, nasally, intraosseously (i.e. intraosseous infusion), intraperitoneally, intrathecally, transdermally, or transmucosally. In some embodiments, the biodegradable particle is administered to the subject intravenously or subcutaneously. In further embodiments, the biodegradable particle is administered to the subject intravenously. In further embodiments, the biodegradable particle is administered to the subject subcutaneously.

[0051] Some aspects of the present invention provide methods for increasing or inducing a protective immune response in a subject comprising administering an effective amount of a biodegradable particle described herein, wherein the biodegradable particle is administered to the subject to treat or prevent a disease or condition. In some embodiments, the disease or condition is a cancer or an infectious disease. In some embodiments, the cancer is selected from the group consisting of a carcinoma, a lymphoma, a blastoma, a sarcoma such as liposarcoma, osteogenic sarcoma, angiosarcoma, endotheliosarcoma, leiomyosarcoma, chordoma, lymphangiosarcoma, lymphangioendotheliosarcoma, rhabdomyosarcoma, fibrosarcoma, myxosarcoma, chondrosarcoma, a neuroendocrine tumor, mesothelioma, synovioma, schwannoma, meningioma, adenocarcinoma, melanoma, a leukemia, and a lymphoid malignancy. In some embodiments, the two or more antigenic epitopes each comprise at least a portion of a protein selected from the group consisting of CD19, CD20, BCMA, CD22, CLL1, CD33, CEA, CD123, CS1, EGFR, PSMA, EphA2, MCSP, ADAM17, PSCA, TPTE, HPU16, immature laminin receptor, TAG-72, HPV E6, HPV E7, BING-4, Calcium-activated chloride channel 2, cyclin B₁, 9D7, Ep-CAM, EphA3, Her2/neu, telomerase, mesothelin, SAP-1, survivin, proteins of the BAGE family, proteins of the CAGE family, proteins of the GAGE family, proteins of the MAGE family (e.g., MAGE-A3), proteins of the SAGE family, proteins of the XAGE family, CT9, CT10, NY-ESO1/LAGE-1, PRAME, SSX-2, Melan-A/MART-1, Cp100/pmel17, tyrosinase, TRP-1/TRP-2, P.polypeptide, MC1R, prostate-specific antigen, β-catenin, BRCA1/2, CDK4, CML66, fibronectin, MART-2, p53, Ras, TGF-βRII, and MUC1.

[0052] In some embodiments, the infectious disease is a bacterial, fungal, parasitic, or viral infection. In some embodiments, the viral infection is selected from the group consisting of a herpes virus infection, hepatitis virus infection, West Nile virus infection, flavivirus infection, influenza virus infection, rhinovirus infection, papillomavirus infection, paramyxovirus infection, parainfluenza virus infection, and/or a retrovirus infection. In some embodiments, the bacterial infection is selected from the group consisting of a Staphylococcus infection, Streptococcus infection, mycobacterial infection, Bacillus infection, Salmonella infection, Vibrio infection, Spirochete infection, and Neisseria infection.

[0053] Some aspects of the present invention provide a biodegradable particle comprising one or more fusion proteins encapsulated therein, wherein each one of said one or more fusion proteins comprises two or more antigenic epitopes selected from the group consisting of MOG₁₋₂₀, MBP₁₃₋₃₂, MOG₃₅₋₅₅, MBP₁₄₆₋₁₇₀, PLP₁₃₉₋₁₅₄, MBP₁₁₁₋₁₂₉, and MBP₈₃₋₉₉, wherein said two or more antigenic epitopes are separated by a linker, wherein said linker comprises an amino acid sequence susceptible to specific cleavage, wherein said biodegradable particle has a diameter of about 200 nm to 1000 nm, and wherein said biodegradable particle has a negative zeta potential of less than −30 mV.

[0054] Some aspects of the present invention provide methods of treating multiple sclerosis in a subject comprising administering to the subject an effective amount of a biodegradable particle comprising one or more fusion proteins encapsulated therein, wherein each one of said one or more fusion proteins comprises two or more antigenic epitopes selected from the group consisting of MOG₁₋₂₀, MBP₁₃₋₃₂, MOG₃₅₋₅₅, MBP₁₄₆₋₁₇₀, PLP₁₃₉₋₁₅₄, MBP₁₁₁₋₁₂₉, and MBP₈₃₋₉₉, wherein said two or more antigenic epitopes are separated by a linker, wherein said linker comprises an amino acid sequence susceptible to specific cleavage, wherein said biodegradable particle has a diameter of about 200 nm to 1000 nm, and wherein said biodegradable particle has a negative zeta potential of less than 30 mV. In some embodiments, the biodegradable particle is administered to the subject orally, intravenously, sublingually, buccally, enterically, topically, rectally, subcutaneously, nasally, intraosseously (i.e., intraosseous infusion), intraperitoneally, intrathecally, transdermally, or transmucosally. In some embodiments, the biodegradable particle is administered to the subject intravenously or subcutaneously. In further embodiments, the biodegradable particle is administered to the subject intravenously. In further embodiments, the biodegradable particle is administered to the subject subcutaneously.

### BRIEF DESCRIPTION OF THE DRAWINGS

[0055] FIG. 1 shows an exemplary fusion protein that is encapsulated into a biodegradable particle.

[0056] FIG. 2 illustrates the multi-peptide concept. A table of tolerogenic and control antigens, amino acid sequences, and molecular weights is shown (FIG. 2A). Also shown is a diagram highlighting the difference between one (top) and multiple (bottom) encapsulated peptides (FIG. 2B).

[0057] FIG. 3 shows physical analysis, including size distribution (FIG. 3A) and Zeta potential (FIG. 3B), of particles encapsulating PLP₁₃₉₋₁₅₁ as determined by light scattering.

[0058] FIG. 4 shows results of in vitro proliferation assays of PLG nanoparticles with DO11.10 transgenic T cells. FIG. 4A shows results of cells with nanoparticles alone. FIG. 4B shows results of cells with nanoparticles and 1 μg Ova323.

[0059] FIG. 5 shows results of in vitro proliferation assays of PLG nanoparticles with transgenic DO11.10 transgenic T cells. Shown are the results of nanoparticles alone (FIG. 5A), cell with nanoparticles only (FIG. 5B), cells with nanoparticles and 1 μg Ova₃₂₃ (FIG. 5C), and cells with nanoparticles and 1 μg/mL αCD28 (FIG. 5D).

[0060] FIG. 6 shows an inventory of particle batches encapsulating tolerogenic antigens individually (PLP₁₃₉₋₁₅₁, PLP₁₇₈₋₁₉₁, MBP₈₄₋₁₀₄, and MOG₉₂₋₁₀₆) or together (Tolerogenic together).

[0061] FIG. 7 shows an inventory of particle batches encapsulating control peptides individually (Ova₃₂₃₋₃₃₉, PLP₅₆₋₇₀, VP1₂₃₃₋₂₅₀, and VP2₇₀₋₈₆) or together (Control together).

[0062] FIG. 8 shows effects of PLG particles encapsulating control (OVA₃₂₃₋₃₃₉-PLG) or tolerogenic (PLP₁₃₉₋₁₅₁-PLG) peptides on splenic regulatory Type 1 T regulatory cell (TR1) populations. FIG. 8A shows percentages of LAG3⁺FoxP3⁻ cells in mice injected with PLG particles encapsulating control or tolerogenic peptides on Day 3 (left) and Day 5 (right), and the percentage of antigen-specific TR1 cells (LAG3⁺FoxP3⁻) that are also IFNγ⁺IL-10⁺. FIG. 8B shows the number of LAG3⁺FoxP3⁻ cells in mice treated with particles encapsulating control or tolerogenic peptides. FIG. 8C shows the number of LAG3⁺FoxP3⁻IFNγ⁺IL-10⁺ cells in mice treated with particles encapsulating control or tolerogenic peptides.

[0063] FIG. 9 shows data from a separate but duplicate experiment from FIG. 8. These data are different from the data shown in FIG. 8 in that the TR1s are not confirmed as FoxP3⁻ for this graph.

[0064] FIG. 10 shows flow cytometry results for splenic regulatory T cell populations following a transfer of naïve 5B6 (PLP₁₃₉₋₁₅₁ TCR transgenic mice) lymphocytes into näive SJL mice and treatment with either PLP₁₃₉₋₁₅₁-PLG particles or control OVA₃₂₃₋₃₃₉-SE PLG particles. All results are gated on CD90.1/Thy1.1 (PLP₁₃₉₋₁₅₁ TCR⁺) populations.

[0065] FIG. 11 shows T cell populations following transfer of CD4⁺ cells from 5B6 donors into näive SJL mice and treatment with either PLP₁₃₉₋₁₅₁-SE PLG particles or control OVA₃₂₃₋₃₃₉-SE PLG particles (d3 and d5). EAE was induced in a separate cohort (d5 post-EAE and d17 post-EAE). Shown are flow cytometry analyses for numbers antigen-specific T cells (FIG. 11A), proliferating antigen-specific T cells (FIG. 11B), antigen-specific regulatory T cells (FIG. 11C), and non-antigen specific regulatory T cells (FIG. 11D). All results are gated on CD90.1/Thy1.1 (PLP₁₃₉₋₁₅₁ TCR⁺) populations unless otherwise indicated (FIG. 11D).

[0066] FIG. 12 shows antigen-specific regulatory T cell expansion following transfer of CD4⁺ cells from DO11 (OVA₃₂₃₋₃₃₉ TCR transgenic mice) donors into naïve Balb/c RAG KO mice and treatment with either OVA₃₂₃₋₃₃₉-SE PLG particles or control PLP₁₃₉₋₁₅₁-SE PLG particles. Shown are flow cytometry analyses for the percentage (FIG. 12A) and numbers (FIG. 12B) of regulatory CD25⁺FoxP3⁺ T Cell populations. All results are gated on DO11 TCR⁺ populations.

[0067] FIG. 13 shows IFNγ-producing antigen-specific regulatory T cells following transfer of CD4⁺ cells from DO11 (OVA₃₂₃₋₃₃₉ TCR transgenic mice) donors into naïve Balb/c RAG KO mice and treatment with either OVA₃₂₃₋₃₃₉-SE PLG particles or control PLP₁₃₉₋₁₅₁-SE PLG particles. Shown are flow cytometry analyses of percentages (FIG. 13A) and numbers (FIG. 13B) of IFNγ-producing antigen-specific regulatory T cells.

[0068] FIG. 14 shows TR1 populations following transfer of CD4⁺ cells from DO11 (OVA₃₂₃₋₃₃₉ TCR transgenic mice) donors into naïve Balb/c RAG KO mice and treatment with either OVA₃₂₃₋₃₃₉-SE PLG particles or control PLP₁₃₉₋₁₅₁-SE PLG particles. Shown are flow cytometry analyses of percentages (FIG. 14A) and numbers (FIG. 14B).

[0069] FIG. 15 shows proliferation of antigen-specific regulatory T Cell populations after infusion of OVA₃₂₃₋₃₃₉-SE PLG particles or control PLP₁₃₉₋₁₅₁-SE PLG particles. Shown are flow cytometry results for Ki67⁺ DO11 TCR⁺ CD4⁺ cells (FIG. 15A), CD25⁺FoxP3⁺ gated on DO11 TCR⁺ CD4⁺ cells (FIG. 15B), and Ki67⁺CD49b⁺LAG3⁺ cells (FIG. 15C, from separate experiment, not confirmed as FoxP3⁻).

[0070] FIG. 16 shows the amino acid sequence of a PLP139-Ova323 fusion peptide linked by cathepsin-specific cleavage sites.

[0071] FIG. 17 shows results of an in vitro proliferation assay with the PLP139-Ova323 fusion peptide and DO11 (FIG. 17A) or 5B6 (FIG. 17B) cells.

[0072] FIG. 18 shows the characterization of three different attempts at encapsulation of the PLP139-Ova323 fusion peptide.

[0073] FIG. 19 shows the results of an in vitro proliferation assay DO11.10 transgenic T-cells treated with PLG(PLP139-Ova323) particles, PLG(Ova323) particles, or PLG(PLP139) particles. Shown are the results of cell treated with nanoparticles alone (FIG. 19A), nanoparticles and 1 μg Ova₃₂₃ (FIG. 19B), and nanoparticles, 1 μg Ova323, and 1 μg/mL αCD28 (FIG. 19C).

[0074] FIG. 20 shows the results of an in vitro proliferation assay with 5B6 transgenic T-cells treated with PLG(PLP139-Ova323) particles, PLG(Ova323) particles, or PLG(PLP139) particles. Shown are the results of cell treated with nanoparticles alone (FIG. 20A), nanoparticles and 1 μg PLP139 (FIG. 20B), and nanoparticles, 1 μg PLP139, and 1 μg/mL αCD28 (FIG. 20C).

[0075] FIG. 21 is a table showing the inventory of particle batches encapsulating PLP139-Ova323 fusion peptide.

[0076] FIG. 22 shows induction of EAE after administration of a PLP139-Ova323 fusion peptide, demonstrated by disease score (FIG. 22A) and mean ear swelling (FIG. 22B).

[0077] FIG. 23 shows amino acid sequences of four-epitope fusion peptides; EAE-1 linked epitopes, PLP139:PLP178:MOG92:MBP (FIG. 23A) and control linked epitopes, OVA323:PLP56:VP1-233:VP2-70 (FIG. 23B).

[0078] FIG. 24 shows characterization of nanoparticles encapsulating tolerogenic antigen fusion peptide (EAE-1 linked epitopes).

[0079] FIG. 25 is a table showing an inventory of particle batches encapsulating tolerogenic fusion peptide (EAE-1 linked epitopes) or negative control fusion peptide.

[0080] FIG. 26 shows the encapsulation efficiency of single EAE-specific epitopes and linked EAE-specific epitopes.

[0081] FIG. 27 shows the effects of encapsulated EAE-1 linked epitopes (EAE-1 tolerance treatment) on EAE disease score compared to encapsulated control linked epitopes (control linked epitope tolerance), OVA, and PLP139.

[0082] FIG. 28 demonstrates that FALK peptides induce EAE (FIG. 28A) and induce T cell proliferation (FIG. 28B).

[0083] FIG. 29 shows potential fusion peptides comprising neoepitopes, immune modulators, and TLR agonists.

[0084] FIG. 30 shows an outline of a protocol for development of linked-oncologic epitope proteins, subsequent nanoparticle encapsulation, and administration to patients.

[0085] FIG. 31 shows anticipated results of functional in vitro assays with peripheral blood monocytes treated with encapsulated NyEsol with or without anti-PD1. Shown are assays for the effects on T cell proliferation (FIG. 31A), IFNγ production (FIG. 31B), and IFNα production (FIG. 31C).

[0086] FIG. 32 shows anticipated survival curves for mice treated with encapsulated NyEsol with or without anti-PD1 in a mouse model of melanoma.

[0087] FIG. 33 shows exemplary in vitro functional assays for PBMCs treated with encapsulated, linked NY-ESO-1:Mage-A3:TPTE:Tyrosinase fusion proteins. Shown are anticipated results of T cell proliferation assays (FIG. 33A) and IFNγ production (FIG. 33B).

[0088] FIG. 34 shows potential fusion peptides comprising epitopes found in numerous disease and disorders.

### DETAILED DESCRIPTION OF THE INVENTION

[0089] The present inventors have found that nanoparticles encapsulating fusion proteins comprised of multiple peptide epitopes connected by cleavable linkers with specific protease sites can induce antigen-specific immune tolerance thus regulating the immune response in a multitude of disease models. In one embodiment, such particles are capable of decreasing the immune response to one or more of the peptide epitopes of the fusion protein, and are particularly useful in the treatment of diseases or conditions characterized by an excessive inflammatory immune response associated with more than one antigenic epitope, such as autoimmune diseases or allergies. In another embodiment, such particles are capable of inducing a protective immune response to one or more of the peptide epitopes of the fusion protein, and are particularly useful in the treatment of disease or conditions characterized by the absence of an immunogenic response, such as cancer.

[0090] As used in this specification and the appended claims, the singular forms “a,” “an” and “the” include plural references unless the content clearly dictates otherwise.

[0091] As used in this specification, the term “and/or” is used in this disclosure to either “and” or “or” unless indicated otherwise.

[0092] Throughout this specification, unless the context requires otherwise, the word “comprise”, or variations such as “comprises” or “comprising”, will be understood to imply the inclusion of a stated element or integer or group of elements or integers but not the exclusion of any other element or integer or group of elements or integers.

[0093] All publications and patents mentioned in the present application and/or listed below are herein incorporated by reference in their entireties.

### Fusion Proteins

[0094] Particular embodiments of the present invention are based, at least in part, on the novel discovery that particles encapsulating multiple antigens or epitopes can induce tolerance to each of these antigens when the antigens are linked together in a fusion protein by cleavable linkers. In some embodiments, the linkers are amino acid sequences that contain specific protease sites, and can be designed to allow for processing by the Class I pathway or the Class II pathway. In such embodiments, particle-encapsulated epitopes that are linked on the same fusion protein can be processed by both the class I and class II pathways. Thus, epitopes that are processed by the class I pathway can be linked in an encapsulated fusion protein with epitopes that are processed by the class II pathway

[0095] In some embodiments described herein, fusion proteins are encapsulated by biodegradable particles. The terms “fusion protein,” “fusion peptide,” “fusion polypeptide,” and “chimeric peptide” are used interchangeably herein and refer to one polypeptide chain created through the joining of two or more nucleotide sequences that originally encode for distinct proteins, or distinct parts of the same protein. Suitable fragments of an antigen for incorporation into the fusion protein described herein include any fragment of the full-length peptide that retains the function of generating the desired antigen-specific tolerance function of the present invention. “Fragment” refers to a portion of a protein. This portion contains, preferably, at least 10%, 20%, 30%, 40%, 50%, 60%, 70%, 80%, or 90% of the entire length of the reference sequence of the protein.

[0096] The fusion protein may be created by various means understood in the art (e.g., genetic fusion, chemical conjugation, etc.). The polypeptides forming the fusion protein are typically linked C-terminus to N-terminus, although they can also be linked C-terminus to C-terminus, N-terminus to N-terminus, or N-terminus to C-terminus. The polypeptides of the fusion protein can be in any order. The two proteins may be fused either directly or via an amino acid linker. A peptide linker sequence may be employed to separate the first and second polypeptide components by a distance sufficient to ensure that each polypeptide folds into its secondary and tertiary structures. Amino acid sequences which may be usefully employed as linkers include those disclosed in Maratea et. al., Gene 40:39-46 (1985); Murphy et al., Proc. Natl. Acad. Sci. USA 83:8258-8262 (1986); U.S. Pat. Nos. 4,935,233 and 4,751,180; herein incorporated by reference in their entireties. The linker sequence may generally be from 1 to about 50 amino acids in length. In some embodiments, linker sequences are not required and/or utilized, for example, when the first and second polypeptides have non-essential N-terminal amino acid regions that can be used to separate the functional domains and prevent steric interference.

[0097] In a preferred embodiment, the individual antigens or epitopes are linked via an amino acid linker comprising a protease cleavage site that is specific for an intracellular protease (e.g., a protease present in the phagolysosome or cytosol of the cell). In some embodiments, the individual antigens or epitopes are linked by linkers comprising the same protease cleavage site. In some embodiments, the individual antigens or epitopes are linked by linkers comprising different protease cleavage sites. In further embodiments, one or more of the linker sequences in a fusion protein may comprise one or more protease cleavage sites.

[0098] Cleavage of the fusion protein by proteases located in the phagolysosome or cytosol directs the cleavage products (e.g., the individual peptide epitopes) for Class I or Class II antigen presentation. Class I antigen presentation is mediated by cytosolic proteases and major histocompatibility complex (MHC)-I and facilitates the presentation of intracellular proteins. As such, MHCI molecules typically present self-antigens or foreign proteins as a result of intracellular infection. Antigens presented in the context of MHCI are recognized by CD8⁺ T cells and typically lead to a cytotoxic response. Class II antigen presentation is mediated by phagocytosis of extracellular antigens, which are degraded by proteases present in the phagolysosome. Extracellular antigens are presented in the context of MHCII, and are recognized by CD4⁺ T cells. This recognition can lead to multiple downstream immune responses, such as Th1, Th2, Th17, Th22, or T regulatory responses depending on the nature of the antigen, the activation state of the antigen presenting cell, and the local cytokine microenvironment.

[0099] As such, introduction of specific cleavage sites allows for the regulation of the downstream immune response phenotype. For example, in the context of autoimmunity, it may be desirable to introduce cleavage sites for proteases present in the phagolysosome to increase the probability that the epitopes present in the fusion protein are presented in MHCII and lead to a regulatory or tolerogenic response. Alternatively, in the context of cancer therapeutics, it may be desirable to introduce cleavage sites for proteases present in the cytosol to increase the probability that the epitopes present in the fusion protein are presented in MHCI and result in a cytotoxic response that kills the cancerous cell.

[0100] The cleavage sites can be specific for any type of protease, such as serine proteases, cysteine proteases (e.g. cathepsins), metalloproteases, aspartic proteases, and others. In some embodiments, the cleavage sites are specific for cathepsin and/or furin proteases located in the phagolysosome. In some embodiments, the cleavage site is specific for any one or more of cathepsin proteases located in the phagolysosome such as cathepsin A, cathepsin B, cathepsin C, cathepsin D, cathepsin E, cathepsin F, cathepsin G, cathepsin H, cathepsin K, cathepsin L, cathepsin O, cathepsin W, or cathepsin Z. In a particular embodiment, the cleavage site is specific for cathepsin L. In some embodiments, the cleavage sites are specific for cathepsin and/or furin proteases located in the cytosol. In a particular embodiment, the cleavage site is specific for cathepsin S. In a further embodiment, the fusion protein comprises cleavage sites specific for cathepsin S and cathepsin L. In a particular embodiment, the linker sequence is Gly-Ala-Val-Val-Arg-Gly-Ala (SEQ ID NO: 5141).

[0101] As used herein, an “antigen” or “antigenic moiety” refers to any moiety, for example a peptide, that is recognized by the host's immune system. Examples of antigenic moieties include, but are not limited to, autoantigens, enzymes, and/or bacterial or viral proteins, peptides, drugs or components. An antigen may comprise one or more epitopes. As use herein, an “epitope” refers to a portion of an antigen recognized by an antibody or a T cell receptor. Not all epitopes are linear epitopes; epitopes can also be discontinuous, conformational epitopes. A number of discontinuous epitopes associated with autoimmune diseases or inflammatory diseases and/or disorders are known. In some embodiments, fusion proteins of the present invention comprise epitopes or antigens that have been previously described by PCT Application Publication No. WO 2015/023796, U.S. Patent Publication No. US 2015-0283218, and U.S. Patent Publication No. US 2015-0190485, each of which are hereby incorporated by reference in their entirety. Sequence identifiers used herein are consistent in their numbering with the sequence identifiers of U.S. Patent Publication No. US 2015-0190485.

[0102] In certain embodiments of this invention, the antigen or epitope is not in the same form as expressed in the subject being treated, but is a fragment or derivative thereof. Inducing antigens of this invention include peptides based on a molecule of the appropriate specificity but adapted by fragmentation, residue substitution, labeling, conjugation, and/or fusion with peptides having other functional properties. The adaptation may be performed for any desirable purposes, including but not limited to the elimination of any undesirable property, such as toxicity or immunogenicity; or to enhance any desirable property, such as mucosal binding, mucosal penetration, or stimulation of the tolerogenic arm of the immune response. Terms such as insulin peptide, collagen peptide, and myelin basic protein peptide, as used herein, refer not only to the intact subunit, but also to allotypic and synthetic variants, fragments, fusion peptides, conjugates, and other derivatives that contain a region that is homologous (preferably 70% identical, more preferably 80% identical and even more preferably 90% identical at the amino acid level) to at least 10 and preferably 20 consecutive amino acids of the respective molecule for which it is an analog, wherein the homologous region of the derivative shares with the respective parent molecule an ability to induce tolerance to the target antigen.

[0103] It is recognized that tolerogenic regions of an inducing antigen are often different from immunodominant epitopes, for example, for the stimulation of an antibody and/or T cell response. Tolerogenic regions are generally regions that can be presented in particular cellular interactions involving T cells. Tolerogenic regions may be present and capable of inducing tolerance upon presentation of the intact antigen. Some antigens contain cryptic tolerogenic regions, in that the processing and presentation of the native antigen does not normally trigger tolerance. An elaboration of cryptic antigens and their identification is found in International Patent Publication WO 94/27634.

[0104] In certain embodiments of this invention, fusion proteins are comprised of two, three, or a higher plurality of antigen or epitopes. It may be desirable to implement these embodiments when there is a plurality of target antigens.

[0105] Antigens can be prepared by a number of techniques known in the art, depending on the nature of the molecule. Polynucleotide, polypeptide, and carbohydrate antigens can be isolated from cells of the species to be treated in which they are enriched. Short peptides are conveniently prepared by amino acid synthesis. Longer proteins of known sequence can be prepared by synthesizing an encoding sequence or PCR-amplifying an encoding sequence from a natural source or vector, and then expressing the encoding sequence in a suitable bacterial or eukaryotic host cell.

[0106] In some embodiments, the antigens or epitopes are derived from a therapeutic antibody, antigen-binding fragment, or Fc fragment thereof. In some embodiments, the antigen is derived from a variant therapeutic antibody or antigen-binding fragment thereof that lacks functional complementarity determining regions (CDRs), In such embodiments, the antibody or antigen-binding fragment thereof may include a monoclonal antibody, a humanized monoclonal antibody, a human monoclonal antibody, a chimeric antibody, a single chain antibody, fragment antigen binding region (Fab), a single chain variable fragment (scFv), small modular immunopharmaceutical (SMIP), or a single antigen-binding domain. In some embodiments, the therapeutic antibody or antigen-binding fragment thereof binds to α4β1 integrin, Bacillus anthracis, B-L gamma S, C5, CD3, CD11a, CD20, CD25, CD30, CD33, CD52, CD59, CTLA4, EGFR, GD2, GPIIb, IIIa, HER2, IgE, IL-10, IL-5, IL12/23, PCSK9, PD1, RANK, RSV F protein, TNFα, or VEGF-A.

[0107] In some embodiments, the antigen is derived from a therapeutic antibody such as Abciximab, Adalimumab, Adotrastuzumab emtansine, Alemtuzumab, Basiliximab, Bevacizumab, Belimumab, Blinatumomab, Brentuximab Vedotin, Canakinumab, Catumaxomab, Cetuximab, Certolizumab pegol, Daclizumab, Denosumab, Dinutuximab, Eculizumab, Efalizumab, Evolocumab, Gemtuzumab ozogamicin, Golimumab, Ibritumomab tiuxetan, Ipilimumab, Infliximab, Motavizumab, Muromonab, Natalizumab, Nivolumab, Obinutuzumab, Ofatumumab, Omalizumab, Panitumumab, Palivizumab, Pembrolizumab, Pertuzumab, Ramucirumab, Ranibizumab, Raxibacumab, Rituximab, Secukinumab, Siltuximab, Trastuzumab, Tocilizumab, Tositumomab-I-131, Ustekinumab, or Vedolizumab.

[0108] In certain embodiments of this invention, the combination comprises a complex mixture of antigens obtained from a cell or tissue, one or more of which plays the role of inducing antigen. The antigens may be in the form of whole cells, either intact or treated with a fixative such as formaldehyde, glutaraldehyde, or alcohol. The antigens may be in the form of a cell lysate, created by detergent solubilization or mechanical rupture of cells or tissue, followed by clarification. The antigens may also be obtained by subcellular fractionation, particularly an enrichment of plasma membrane by techniques such as differential centrifugation, optionally followed by detergent solubilization and dialysis. Other separation techniques are also suitable, such as affinity or ion exchange chromatography of solubilized membrane proteins.

[0109] In one embodiment, the antigenic peptide or protein is an autoantigen, an alloantigen, neoantigen, oncoanitgen, or a transplantation antigen. In yet another particular embodiment, the autoantigen is selected from the group consisting of myelin basic protein, collagen or fragments thereof, DNA, nuclear and nucleolar proteins, mitochondrial proteins and pancreatic β-cell proteins. In some embodiments, one or more fusion proteins comprises the antigenic epitopes MOG₁₋₂₀, MBP₁₃₋₃₂, MOG₃₅₋₅₅, MBP₁₄₆₋₁₇₀, PLP₁₃₉₋₁₅s, MBP₁₁₁₋₁₂₉, and/or MBP₈₃₋₉₉. In some embodiments, the antigenic peptide or protein is gliadin or a gliadin epitope. In some embodiments, the antigen is one or more antigens selected from the group consisting of SEQ ID NOs: 1295-1724, SEQ ID NOs: 1726-1766 and SEQ ID NOs: 4986-5140.

[0110] The invention provides for the induction of tolerance to an autoantigen for the treatment of autoimmune diseases by administering the antigen for which tolerance is desired. For example, autoantibodies directed against the myelin basic protein (MBP) are observed in patients with multiple sclerosis, and, accordingly, MBP antigenic peptides or proteins may be used in the invention to be delivered using the compositions of the present invention to treat and prevent multiple sclerosis.

[0111] By way of another non-limiting example, a subject who is a candidate for a transplant from a non-identical twin may suffer from rejection of the engrafted cells, tissues or organs, as the engrafted antigens are foreign to the recipient. Prior tolerance of the recipient subject to the intended graft abrogates or reduces later rejection. Reduction or elimination of chronic anti-rejection therapies may be achieved by the practice of the present invention. In another example, many autoimmune diseases are characterized by a cellular immune response to an endogenous or self-antigen. Tolerance of the immune system to the endogenous antigen is desirable to control the disease.

[0112] In a further example, sensitization of a subject to an industrial pollutant or chemical, such as may be encountered on-the-job, presents a hazard of an immune response. Prior tolerance of the subject's immune system to the chemical/pollutant, in particular in the form of the chemical/pollutant reacted with the subject's endogenous proteins, may be desirable to prevent the later occupational development of an immune response.

[0113] Allergens are other antigens for which tolerance of the immune response thereto is also desirable. In one embodiment, the antigen is a gliadin or a gliadin epitope. In a further embodiment, the antigen is A-gliadin or an A-gliadin epitope. In some embodiments, the antigen is a mix of gliadins or gliadin epitopes. In further embodiments, the gliadins or a gliadin epitopes comprise one or more of SEQ ID NOs: 4983-4985.

[0114] Notably, even in diseases where the pathogenic autoantigen is unknown, bystander suppression may be induced using antigens present in the anatomical vicinity. For example, autoantibodies to collagen are observed in rheumatoid arthritis and, accordingly, a collagen-encoding gene may be utilized as the antigen-expressing gene module in order to treat rheumatoid arthritis (See e.g., Choy (2000) Curr Opin Investig Drugs 1: 58-62). Furthermore, tolerance to beta cell autoantigens may be utilized to prevent development of type 1 diabetes (See e.g., Bach and Chatenoud (2001) Ann Rev Immunol 19: 131-161).

[0115] As another example, auto-antibodies directed against myelin oligodendrocyte glycoprotein (MOG) are observed in autoimmune encephalomyelitis and in many other CNS diseases as well as multiple sclerosis (See e.g., Iglesias et al. (2001) Glia 36: 22-34). Accordingly, use of MOG antigen expressing constructs in the invention allows for treatment of multiple sclerosis as well as related autoimmune disorders of the central nervous system.

[0116] Still other examples of candidate autoantigens for use in treating autoimmune disease include: myelin basic protein, acetylcholine receptor, endogenous antigen, myelin oligodendrocyte glycoprotein, pancreatic beta-cell antigen, insulin, glutamic acid decarboxylase (GAD), collagen type 11, human cartilage gp39, fp130-RAPS, proteolipid protein, fibrillarin, small nucleolar protein, thyroid stimulating factor receptor, histones, glycoprotein gp70, pyruvate dehydrogenase dihydrolipoamide acetyltransferase (PCD-E2), hair follicle antigen, A-gliadin, gliadin, insulin, proinsulin, islet specific glucose-6-phosphatase catalytic subunit-related protein (IGRP), human tropomyosin isoform 5, Bahia grass pollen (BaGP), peach allergen Pru p 3, alpha s 1-Caein Milk allergen, Apigl celery allergen, Berel Brazil nut allergen, B-Lactoglobulin Milk allergen, Bovine serum albumin, Cor a 1.04 Hazelnut allergen, myelin associated glycoprotein, aquaporin α3 chain of type IV collagen, Ovalbumin Egg allergen, Advate, antihemophilic factor, Kogenate, Eloctate, recombinant factor VIII Fc fusion protein, Refacto, Novo VIIa, recombinant factor VII, eptacog alfa, Helixate, Monanine, Coagulation Factor IX, Wilate, Ceredase, Alglucerase, Cerezyme, Imiglucerase, Elelso, taliglucerase alfa, Fabrazyme, Agalsidase beta, Aldurazyme, -I-iduronidase, Myozyme, Acid-glucosidase, Elaprase, iduronate-2-sulfatase, Naglazyme arylsufatase B, or N-acetylgalactosamine-4-sulfatase pancreatic beta-cell antigens, insulin and GAD to treat insulin-dependent diabetes mellitus; collagen type 11, human cartilage gp 39 (HCgp39) and gpl30-RAPS for use in treating rheumatoid arthritis; myelin basic protein (MBP), proteolipid protein (PLP) and myelin oligodendrocyte glycoprotein (MOG, see above) to treat multiple sclerosis; fibrillarin, and small nucleolar protein (snoRNP) to treat scleroderma; thyroid stimulating factor receptor (TSH-R) for use in treating Graves' disease; nuclear antigens, histones, glycoprotein gp70 and ribosomal proteins for use in treating systemic lupus erythematosus; pyruvate dehydrogenase dihydrolipoamide acetyltransferase (PCD-E2) for use in treating primary biliary cirrhosis; hair follicle antigens for use in treating alopecia areata; and human tropomyosin isoform 5 (hTM5) for use in treating ulcerative colitis. In some embodiments, the antigens are selected from SEQ ID NOS: 2-1294.

[0117] Combinations can be humanized for their ability to promote tolerance by conducting experiments with isolated cells or in animal models.

[0118] In some embodiments, the tolerance inducing compositions of the present invention contain an apoptosis signaling molecule (e.g., in addition to a fusion protein). In some embodiments, the apoptosis signaling molecule is coupled and/or associated with the surface of the carrier. In some embodiments an apoptotic signaling molecules allows a carrier to be perceived as an apoptotic body by antigen presenting cells of the host, such as cells of the host reticuloendothelial system; this allows presentation of the associated peptide epitopes in a tolerance-inducing manner. Without being bound by theory, this is presumed to prevent the upregulation of molecules involved in immune cell stimulation, such as MHC class I/II, and costimulatory molecules. These apoptosis signaling molecules may also serve as phagocytic markers. For example, apoptosis signaling molecules suitable for the present invention have been described in U.S. Pat. No. 8,198,020, which is hereby incorporated by reference in its entirety. Molecules suitable for the present invention include molecules that target phagocytes, which include macrophages, dendritic cells, monocytes and neutrophils.

[0119] In some embodiments, molecules suitable as apoptotic signaling molecules act to enhance tolerance of the associated peptides. Additionally, a carrier bound to an apoptotic signaling molecule can be bound by Clq in apoptotic cell recognition (Paidassi et al., (2008) J. Immunol. 180:2329-2338; herein incorporated by reference in its entirety). For example, molecules that may be useful as apoptotic signaling molecules include rapamycin, phosphatidyl serine, annexin-1, annexin-5, milk fat globule-EGF-factor 8 (MFG-E8), or the family of thrombospondins (e.g., thrombospondin-1 (TSP-1)). Various molecules suitable for use as apoptotic signaling molecules with the present invention are discussed, for example, in U.S. Patent Publication No. 2012/0076831; herein incorporated by reference in its entirety.

[0120] In some embodiments, the fusion protein comprises one or more immune agonist. An immune agonist, as used herein, refers to a molecule that activates a particular immune signaling pathway, particularly an immunogenic signaling pathway. In some embodiments, the immune agonist activates a pattern recognition receptor such as a Toll-like receptor (TLR), C-type lectin receptor (CLR), NOD-like receptor, RIG-like receptor, or others. In particular embodiments, the agonist is a TLR agonist, such as a TLR1, TLR2, TLR3, TLR4, TLR5, TLR6, TLR7, TLR9, or TLR10 agonist. In such embodiments, the immune agonist facilitates the generation of an immunogenic response against one or more of the epitopes comprised within the fusion protein. Such embodiments are particularly useful in the context of vaccines and cancer immunotherapy.

[0121] By way of example, and not intended to be limiting, a hypothetical exemplary fusion protein is shown in FIG. 1 and contains the epitopes MOG₁₋₂₀, MOG₃₅₋₅₅, MBP₁₃₋₃₂, MBP₈₃₋₉₉, MBP₁₁₁₋₁₂₉, MBP₁₄₆₋₁₇₀, and PLP₁₃₉₋₁₃₄, which are associated with multiple sclerosis (MS). The fusion protein is constructed by linking these 7 polypeptide epitopes together with specific linkers. These linkers are repeated amino acid sequences susceptible to cleavage by specific proteases. This protein will have a generic isoelectric point (PI) and solubility. When encapsulated into a particle, the particle will encapsulate the polypeptide epitopes at an equal ratio to each other.

### Biodegradable Particles

[0122] Certain embodiments are directed to biodegradable particles that encapsulate a fusion protein comprising two or more peptides, antigens, or epitopes connected by an amino acid linker sequence comprising specific protease sites. Particular embodiments contemplate that these particles are surprisingly effective at inducing tolerance to some or all of the linked peptides, antigens, or epitopes of the fusion proteins. Certain embodiments contemplate that the manufacture of these biodegradable particles is improved compared to biodegradable particles that encapsulate more than one peptide, antigen, and/or epitope that are not linked in a fusion protein

[0123] “Particle” as used herein refers to any non-tissue derived composition of matter, it may be a sphere or sphere-like entity, bead, or liposome. The term “particle”, the term “immune modifying particle”, the term “carrier particle”, and the term “bead” may be used interchangeably depending on the context. Additionally, the term “particle” may be used to encompass beads and spheres. The particle may have any particle shape or conformation. However, in some embodiments it is preferred to use particles that are less likely to clump in vivo. Examples of particles within these embodiments are those that have a spherical shape.

[0124] “Negatively charged particle” as used herein refers to particles which have been modified to possess a net surface charge that is less than zero.

[0125] “Carboxylated particles” or “carboxylated beads” or “carboxylated spheres” includes any particle that has been modified to contain a carboxyl group on its surface. In some embodiments the addition of the carboxyl group enhances phagocyte/monocyte uptake of the particles from circulation, for instance through the interaction with scavenger receptors such as MARCO. Carboxylation of the particles can be achieved using any compound which adds carboxyl groups, including, but not limited to, poly(acrylic acid), Poly(ethylene-maleic anhydride) (PEMA), poly(vinyl alcohol) and sodium cholate.

[0126] In some embodiments, an antigenic peptide molecule is coupled to the carrier particle (e.g., immune modifying particle) by a conjugate molecule and/or linker group. In some embodiments, coupling of the antigenic peptide and/or apoptotic signaling molecule to the carrier particle (e.g., PLG particle) comprises one or more covalent and/or non-covalent interactions. In some embodiments, the antigenic peptide is attached to the surface of the carrier particle with a negative zeta potential. In some embodiments, the antigenic peptide is encapsulated within the carrier particle with a negative zeta potential. In some embodiments, the antigenic peptide is conjugated or linked to the carrier particle to produce an antigen-conjugated particle (See PCT Application No. PCT/US2016/068423, incorporated herein by reference in its entirety).

[0127] In one embodiment, the buffer solution contacting the immune modified particle may have a basic pH. Suitable basic pH for the basic solution include 7.1, 7.5, 8.0, 8.5, 9.5, 10.0, 10.5, 11.0, 11.5, 12.0, 12.5, 13.0, and 13.5. The buffer solution may also be made of any suitable base and its conjugate. In some embodiments of the invention, the buffer solution may include, without limitation, sodium bicarbonate, potassium bicarbonate, lithium bicarbonate, potassium dihydrogen phosphate, sodium dihydrogen phosphate, or lithium dihydrogen phosphate and conjugates thereof.

[0128] In one embodiment, the buffer solution contacting the immune modified particle may have an acidic pH. Suitable basic pH for the acidic solution include 4, 4.1, 4.2, 4.5, 5, 5.5, 6 and 6.5.

[0129] In one embodiment of the invention, the immune modified particles contain co-polymers. These co-polymers may have varying molar ratio. In some embodiments, the co-polymer ratio of the carrier particles described herein in 50:50. In further embodiments, suitable co-polymer ratio of the carrier particles described herein may be 80:20, 81:19, 82:18, 83:17, 84:16, 85:15, 86:14, 87:13, 88:12, 89:11, 90:10, 91:9, 92:8, 93:7, 94:6, 95:5, 96:4, 97:3, 98:2, 99:1, or 100:0. In another embodiment, the co-polymer may be periodical, statistical, linear, branched (including star, brush, or comb co-polymers) co-polymers. In some embodiments, the co-polymers ratio may be, but not limited to, polystyrene:poly(vinyl carboxylate)/80:20, polystyrene:poly(vinyl carboxylate)/90:10, poly(vinyl carboxylate):polystyrene/80:20, poly(vinyl carboxylate):polystyrene/90:10, polylactic acid:polyglycolic acid/80:20, or polylactic acid:polyglycolic acid/90:10.

[0130] In one embodiment, the particle is a liposome. In a further embodiment, the particle is a liposome composed of the following lipids at the following molar ratios—30:30:40 phosphatidylcholine:phosphatidylglycerol:cholesterol. In yet a further embodiment, the particle is encapsulated within a liposome.

[0131] It is not necessary that each particle be uniform in size, although the particles must generally be of a size sufficient to trigger phagocytosis in an antigen presenting cell or other MPS cell. Preferably, the particles are microscopic or nanoscopic in size, in order to enhance solubility, avoid possible complications caused by aggregation in vivo and to facilitate pinocytosis. Particle size can be a factor for uptake from the interstitial space into areas of lymphocyte maturation. A particle having a diameter of from about 0.1 μm to about 10 μm is capable of triggering phagocytosis. Thus in one embodiment, the particle has a diameter within these limits. In another embodiment, the particle has a diameter of about 0.3 μm to about 5 μm. In still another embodiment, the particle has a diameter of about 0.5 μm to about 3 μm. In a further embodiment, the particle has a diameter of about 0.2 μm to about 1 μm. In a further embodiment the particle has a diameter of about 0.1 μm, 0.2 μm, 0.3 μm, 0.4 μm, 0.5 μm, 1.0 μm, 1.5 μm, 2.0 μm, 2.5 μm, 3.0 μm, 3.5 μm, 4.0 μm, 4.5 μm, or about 5.0 μm. In a particular embodiment the particle has a size of about 0.5 μm. In some embodiments, the overall weights of the particles are less than about 10,000 kDa. In some embodiments, the weights of the particles are less than about 5,000 kDa, 1,000 kDa, 500 kDa, 400 kDa, 300 kDa, 200 kDa, 100 kDa, 50 kDa, 20 kDa, or less than about 10 kDa. The particles in a composition need not be of uniform diameter. By way of example, a pharmaceutical formulation may contain a plurality of particles, some of which are about 0.5 μm, while others are about 1.0 μm. Any mixture of particle sizes within these given ranges will be useful.

[0132] The particles of the current invention can possess a particular zeta potential. In certain embodiments, the zeta potential is negative. In one embodiment, the zeta potential is less than about −100 mV. In one embodiment, the zeta potential is less than about −50 mV. In certain embodiments, the particles possess a zeta potential between −100 mV and 0 mV. In a further embodiment, the particles possess a zeta potential between −75 mV and 0 mV. In a further embodiment, the particles possess a zeta potential between −60 mV and 0 mV. In a further embodiment, the particles possess a zeta potential between −50 mV and 0 mV. In still a further embodiment, the particles possess a zeta potential between −40 mV and 0 mV. In a further embodiment, the particles possess a zeta potential between −30 mV and 0 mV. In a further embodiment, the particles possess a zeta potential between −20 mV and 0 mV. In a further embodiment, the particles possess a zeta potential between −10 mV and 0 mV. In some embodiments, the particles possess a zeta potential between −80 mV and −30 mV. In a further embodiment, the particles possess a zeta potential between −80 mV and −20 mV. In a further embodiment, the particles possess a zeta potential between −80 mV and −10 mV. In a further embodiment, the particles possess a zeta potential between −70 mV and −30 mV. In a further embodiment, the particles possess a zeta potential between −70 mV and −20 mV. In a further embodiment, the particles possess a zeta potential between −70 mV and −10 mV. In a further embodiment, the particles possess a zeta potential between −60 mV and −30 mV. In a further embodiment, the particles possess a zeta potential between −60 mV and −20 mV. In a further embodiment, the particles possess a zeta potential between −60 mV and −10 mV. In a further embodiment, the particles possess a zeta potential between −50 mV and −30 mV. In a further embodiment, the particles possess a zeta potential between −50 mV and −20 mV. In a further embodiment, the particles possess a zeta potential between −50 mV and −10 mV. In a further embodiment, the particles possess a zeta potential between −50 mV and −40 mV. In a further embodiment, the zeta potential is less than about −30 mV.

[0133] In some embodiments, the charge of a carrier particle (e.g., positive, negative, neutral) is selected to impart application-specific benefits (e.g., physiological compatibility, beneficial surface-peptide interactions, etc.). In some embodiments, a carrier particle has a net neutral or negative charge (e.g., to reduce non-specific binding to cell surfaces which, in general, bear a net negative charge). In certain embodiments carrier particles are capable of being conjugated, either directly or indirectly, to an antigen to which tolerance is desired (also referred to herein as an antigen-specific peptide, antigenic peptide, autoantigen, inducing antigen or tolerizing antigen). In some instances, a carrier particle has multiple binding sites (e.g., 2, 3, 4, 5, 6, 7, 8, 9, 10, 20, 50, 100, or more) in order to have multiple copies of an antigen-specific peptide, or multiple different peptides, exposed on the surface (e.g., to increase the likelihood of a tolerance response). In some embodiments, a carrier particle displays a single type of antigenic peptide. In some embodiments, a carrier particle displays multiple different antigenic peptides on the surface. In some embodiments, a carrier particle surface displays functional groups for the covalent attachment of selected moieties (e.g., antigenic peptides). In some embodiments, carrier particle surface functional groups provide sites for non-covalent interaction with selected moieties (e.g., antigenic peptides). In some embodiments, a carrier particle has a surface to which conjugating moieties may be adsorbed without chemical bond formation.

[0134] In some embodiments, the particle is non-metallic. In these embodiments the particle may be formed from a polymer. In a preferred embodiment, the particle is biodegradable in a subject. In this embodiment, the particles can be provided in a subject across multiple doses without there being an accumulation of particles in the subject. Examples of suitable particles include polystyrene particles, PLGA particles, citric acid particles, and diamond particles.

[0135] Preferably the particle surface is composed of a material that minimizes non-specific or unwanted biological interactions. Interactions between the particle surface and the interstitium may be a factor that plays a role in lymphatic uptake. The particle surface may be coated with a material to prevent or decrease non-specific interactions. Steric stabilization by coating particles with hydrophilic layers such as poly(ethylene glycol) (PEG) and its copolymers such as PLURONICS (including copolymers of poly(ethylene glycol)-bl-poly(propylene glycol)-bl-poly(ethylene glycol)) may reduce the non-specific interactions with proteins of the interstitium as demonstrated by improved lymphatic uptake following subcutaneous injections. All of these facts point to the significance of the physical properties of the particles in terms of lymphatic uptake. Biodegradable polymers may be used to make all or some of the polymers and/or particles and/or layers. Biodegradable polymers may undergo degradation, for example, by a result of functional groups reacting with the water in the solution. The term “degradation” as used herein refers to becoming soluble, either by reduction of molecular weight or by conversion of hydrophobic groups to hydrophilic groups. Polymers with ester groups are generally subject to spontaneous hydrolysis, e.g., polylactides and polyglycolides.

[0136] Particles of the present invention may also contain additional components. For example, carriers may have imaging agents incorporated or conjugated to the carrier. An example of a carrier nanosphere having an imaging agent that is currently commercially available is the Kodak X-sight nanospheres. Inorganic quantum-confined luminescent nanocrystals, known as quantum dots (QDs), have emerged as ideal donors in FRET applications: their high quantum yield and tunable size-dependent Stokes Shifts permit different sizes to emit from blue to infrared when excited at a single ultraviolet wavelength. (Bruchez, et al., Science, 1998, 281, 2013; Niemeyer, C. M Angew. Chem. Int. Ed. 2003, 42, 5796; Waggoner, A. Methods Enzymol. 1995, 246, 362; Brus, L. E. J. Chem. Phys. 1993, 79, 5566). Quantum dots, such as hybrid organic/inorganic quantum dots based on a class of polymers known as dendrimers, may be used in biological labeling, imaging, and optical biosensing systems. (Lemon, et al., J. Am. Chem. Soc. 2000, 122, 12886). Unlike the traditional synthesis of inorganic quantum dots, the synthesis of these hybrid quantum dot nanoparticles does not require high temperatures or highly toxic, unstable reagents. (Etienne, et al., Appl. Phys. Lett. 87, 181913, 2005).

[0137] Particles can be formed from a wide range of materials. The particle is preferably composed of a material suitable for biological use. For example, particles may be composed of glass, silica, polyesters of hydroxy carboxylic acids, polyanhydrides of dicarboxylic acids, or copolymers of hydroxy carboxylic acids and dicarboxylic acids. More generally, the carrier particles may be composed of polyesters of straight chain or branched, substituted or unsubstituted, saturated or unsaturated, linear or cross-linked, alkanyl, haloalkyl, thioalkyl, aminoalkyl, aryl, aralkyl, alkenyl, aralkenyl, heteroaryl, or alkoxy hydroxy acids, or polyanhydrides of straight chain or branched, substituted or unsubstituted, saturated or unsaturated, linear or cross-linked, alkanyl, haloalkyl, thioalkyl, aminoalkyl, aryl, aralkyl, alkenyl, aralkenyl, heteroaryl, or alkoxy dicarboxylic acids. Additionally, carrier particles can be quantum dots, or composed of quantum dots, such as quantum dot polystyrene particles (Joumaa et al. (2006) Langmuir 22: 1810-6). Carrier particles including mixtures of ester and anhydride bonds (e.g., copolymers of glycolic and sebacic acid) may also be employed. For example, carrier particles may comprise materials including polyglycolic acid polymers (PGA), polylactic acid polymers (PLA), polysebacic acid polymers (PSA), poly(lactic-co-glycolic) acid copolymers (PLGA or PLG; the terms are interchangeable), [rho]oly(lactic-co-sebacic) acid copolymers (PLSA), poly(glycolic-co-sebacic) acid copolymers (PGSA), etc.

[0138] Other biocompatible, biodegradable polymers useful in the present invention include polymers or copolymers of caprolactones, carbonates, amides, amino acids, orthoesters, acetals, cyanoacrylates and degradable urethanes, as well as copolymers of these with straight chain or branched, substituted or unsubstituted, alkanyl, haloalkyl, thioalkyl, aminoalkyl, alkenyl, or aromatic hydroxy- or di-carboxylic acids. In addition, the biologically important amino acids with reactive side chain groups, such as lysine, arginine, aspartic acid, glutamic acid, serine, threonine, tyrosine and cysteine, or their enantiomers, may be included in copolymers with any of the aforementioned materials to provide reactive groups for conjugating to antigen peptides and proteins or conjugating moieties. Biodegradable materials suitable for the present invention include diamond, PLA, PGA, and PLGA polymers. Biocompatible but non-biodegradable materials may also be used in the carrier particles of the invention. For example, non-biodegradable polymers of acrylates, ethylene-vinyl acetates, acyl substituted cellulose acetates, non-degradable urethanes, styrenes, vinyl chlorides, vinyl fluorides, vinyl imidazoles, chlorosulphonated olefins, ethylene oxide, vinyl alcohols, TEFLON® (DuPont, Wilmington, Del.), and nylons may be employed.

[0139] Suitable beads which are currently available commercially include polystyrene beads such as FluoSpheres (Molecular Probes, Eugene, Oreg.).

[0140] In some embodiments, the present invention provides systems comprising (a) a delivery scaffold configured for the delivery of chemical and/or biological agents to a subject; and (b) antigen-coupled poly(lactide-co-glycolide) particles for induction of antigen-specific tolerance. In some embodiments, at least a portion of said delivery scaffold is microporous. In some embodiments, the antigen-coupled poly(lactide-co-glycolide) particles are encapsulated within said scaffold. In some embodiments, the chemical and/or biological agents are selected from the group consisting of: protein, peptide, small molecules, nucleic acids, cells, and particles. In some embodiments, chemical and/or biological agents comprise cell, and said cells comprise pancreatic islet cells.

[0141] Physical properties are also related to a nanoparticle's usefulness after uptake and retention in areas having immature lymphocytes. These include mechanical properties such as rigidity or rubberiness. Some embodiments are based on a rubbery core, e.g., a poly(propylene sulfide) (PPS) core with an overlayer, e.g., a hydrophilic overlayer, as in PEG, as in the PPS-PEG system recently developed and characterized for systemic (but not targeted or immune) delivery. The rubbery core is in contrast to a substantially rigid core as in a polystyrene or metal nanoparticle system. The term rubbery refers to certain resilient materials besides natural or synthetic rubbers, with rubbery being a term familiar to those in the polymer arts. For example, cross-linked PPS can be used to form a hydrophobic rubbery core. PPS is a polymer that degrades under oxidative conditions to polysulphoxide and finally polysulphone, transitioning from a hydrophobic rubber to a hydrophilic, water-soluble polymer. Other sulphide polymers may be adapted for use, with the term sulphide polymer referring to a polymer with a sulphur in the backbone of the mer. Other rubbery polymers that may be used are polyesters with glass transition temperature under hydrated conditions that is less than about 37° C. A hydrophobic core can be advantageously used with a hydrophilic overlayer since the core and overlayer will tend not to mingle, so that the overlayer tends to sterically expand away from the core. A core refers to a particle that has a layer on it. A layer refers to a material covering at least a portion of the core. A layer may be adsorbed or covalently bound. A particle or core may be solid or hollow. Rubbery hydrophobic cores are advantageous over rigid hydrophobic cores, such as crystalline or glassy (as in the case of polystyrene) cores, in that higher loadings of hydrophobic drugs can be carried by the particles with the rubbery hydrophobic cores.

[0142] Another physical property is the surface's hydrophilicity. A hydrophilic material may have a solubility in water of at least 1 gram per liter when it is un-crosslinked. Steric stabilization of particles with hydrophilic polymers can improve uptake from the interstitium by reducing non-specific interactions; however, the particles' increased stealth nature can also reduce internalization by phagocytic cells in areas having immature lymphocytes. The challenge of balancing these competing features has been met, however, and this application documents the creation of nanoparticles for effective lymphatic delivery to DCs and other APCs in lymph nodes. Some embodiments include a hydrophilic component, e.g., a layer of hydrophilic material. Examples of suitable hydrophilic materials are one or more of polyalkylene oxides, polyethylene oxides, polysaccharides, polyacrylic acids, and polyethers. The molecular weight of polymers in a layer can be adjusted to provide a useful degree of steric hindrance in vivo, e.g., from about 1,000 to about 100,000 or even more; artisans will immediately appreciate that all the ranges and values within the explicitly stated ranges are contemplated, e.g., between 10,000 and 50,000.

[0143] The particles may incorporate functional groups for further reaction. Functional groups for further reaction include electrophiles or nucleophiles; these are convenient for reacting with other molecules. Examples of nucleophiles are primary amines, thiols, and hydroxyls. Examples of electrophiles are succinimidyl esters, aldehydes, isocyanates, and maleimides.

[0144] A great variety of means, well known in the art, may be used to conjugate antigenic peptides and proteins to carriers. These methods include any standard chemistries which do not destroy or severely limit the biological activity of the antigen peptides and proteins, and which allow for a sufficient number of antigen peptides and proteins to be conjugated to the carrier in an orientation which allows for interaction of the antigen peptide or protein with a cognate T cell receptor. Generally, methods are preferred which conjugate the C-terminal regions of an antigen peptide or protein, or the C-terminal regions of an antigen peptide or protein fusion protein, to the earner. The exact chemistries will, of course, depend upon the nature of the earner material, the presence or absence of C-terminal fusions to the antigen peptide or protein, and/or the presence or absence of conjugating moieties.

[0145] Functional groups can be located on the particle as needed for availability. One location can be as side groups or termini on the core polymer or polymers that are layers on a core or polymers otherwise tethered to the particle. For instance, examples are included herein that describe PEG stabilizing the nanoparticles that can be readily functionalized for specific cell targeting or protein and peptide drug delivery.

[0146] Conjugates such as ethylene carbodiimide (ECDI), hexamethylene diisocyanate, propyleneglycol di-glycidylether which contain 2 epoxy residues, and epichlorohydrin may be used for fixation of peptides or proteins to the carrier surface. Without being bound by theory, ECDI is suspected of carrying out two major functions for induction of tolerance: (a) it chemically couples the protein/peptides to the cell surface via catalysis of peptide bond formation between free amino and free carboxyl groups; and, (b) it induces the carrier to mimic apoptotic cell death such that they are picked up by host antigen presenting cells in the spleen and induce tolerance. It is this presentation to host T cells in a non-immunogenic fashion that leads to direct induction of anergy in autoreactive cells. In addition, ECDI serves as a potent stimulus for the induction of specific regulatory T cells.

[0147] In one series of embodiments, the antigen peptides and proteins are bound to the carrier via a covalent chemical bond. For example, a reactive group or moiety near the C-terminus of the antigen (e.g., the C-terminal carboxyl group, or a hydroxyl, thiol, or amine group from an amino acid side chain) may be conjugated directly to a reactive group or moiety on the surface of the carrier (e.g., a hydroxyl or carboxyl group of a PLA or PGA polymer, a terminal amine or carboxyl group of a dendrimer, or a hydroxyl, carboxyl or phosphate group of a phospholipid) by direct chemical reaction. Alternatively, there may be a conjugating moiety which covalently conjugates to both the antigen peptides and proteins and the carrier, thereby linking them together.

[0148] Reactive carboxyl groups on the surface of a carrier may be joined to free amines (e.g., from Lys residues) on the antigen peptide or protein, by reacting them with, for example, 1-ethyl-3-[3,9-dimethyl aminopropyl] carbodiimide hydrochloride (EDC) or N-hydroxysuccinimide ester (NHS). Similarly, the same chemistry may be used to conjugate free amines on the surface of a carrier with free carboxyls (e.g., from the C-terminus, or from Asp or Glu residues) on the antigen peptide or protein. Alternatively, free amine groups on the surface of a carrier may be covalently bound to antigen peptides and proteins, or antigen peptide or protein fusion proteins, using sulfo-SIAB chemistry, essentially as described by Arano et al. (1991) Chem. 2:71-6.

[0149] In another embodiment, a non-covalent bond between a ligand bound to the antigen peptide or protein and an anti-ligand attached to the carrier may conjugate the antigen to the carrier. For example, a biotin ligase recognition sequence tag may be joined to the C-terminus of an antigen peptide or protein, and this tag may be biotinylated by biotin ligase. The biotin may then serve as a ligand to non-covalently conjugate the antigen peptide or protein to avidin or streptavidin which is adsorbed or otherwise bound to the surface of the carrier as an anti-ligand. Alternatively, if the antigen peptides and proteins are fused to an immunoglobulin domain bearing an Fc region, as described above, the Fc domain may act as a ligand, and protein A, either covalently or non-covalently bound to the surface of the carrier, may serve as the anti-ligand to non-covalently conjugate the antigen peptide or protein to the carrier. Other means are well known in the art which may be employed to non-covalently conjugate antigen peptides and proteins to carriers, including metal ion chelation techniques (e.g., using a poly-His tag at the C-terminus of the antigen peptide or protein or antigen peptide or protein fusion proteins, and a Ni⁺-coated carrier), and these methods may be substituted for those described here.

[0150] Conjugation of a nucleic acid moiety to a platform molecule can be effected in any number of ways, typically involving one or more crosslinking agents and functional groups on the nucleic acid moiety and platform molecule. Linking groups are added to platforms using standard synthetic chemistry techniques. Linking groups can be added to nucleic acid moieties using standard synthetic techniques. The practitioner has a number of choices for antigens used in the combinations of this invention. The inducing antigen present in the combination contributes to the specificity of the tolerogenic response that is induced. It may or may not be the same as the target antigen, which is the antigen present or to be placed in the subject being treated which is a target for the unwanted immunological response, and for which tolerance is desired.

[0151] An inducing antigen of this invention may be a polypeptide, polynucleotide, carbohydrate, glycolipid, or other molecule isolated from a biological source, or it may be a chemically synthesized small molecule, polymer, or derivative of a biological material, providing it has the ability to induce tolerance according to this description when combined with the mucosal binding component.

[0152] In some embodiments, the present invention provides a carrier (e.g., immune modifying particle) coupled to one or more peptides, polypeptides, and/or proteins. In some embodiments, a carrier (e.g., PLG carrier), such as those described herein, are effective to induce antigen-specific tolerance and/or prevent the onset of an immune related disease (such as experimental autoimmune encephalomyelitis (EAE) in a mouse model) and/or diminish the severity of a pre-existing immune related disease. In some embodiments, the compositions and methods of the present invention can cause T cells to undertake early events associated with T-cell activation, but do not allow T-cells to acquire effector function. For example, administration of compositions of the present invention can result in T-cells having a quasi-activated phenotype, such as CD69 and/or CD44 upregulation, but do not display effector function, such as indicated by a lack of IFN-γ or IL-17 synthesis. In some embodiments, administration of compositions of the present invention results in T-cells having a quasi-activated phenotype without having conversion of naive antigen-specific T-cells to a regulatory phenotype, such as those having CD25⁺Foxp3⁺ phenotypes.

[0153] In some embodiments, the surface of a carrier (e.g., particle) comprises chemical moieties and/or functional groups that allow attachment (e.g., covalently, non-covalently) of antigenic peptides and/or other functional elements to the carrier. In some embodiments, the number, orientation, spacing, etc. of chemical moieties and/or functional groups on the carrier (e.g., particle) vary according to carrier chemistry, desired application, etc.

[0154] In some embodiments, a carrier comprises one or more biological or chemical agents adhered to, adsorbed on, encapsulated within, and/or contained throughout the carrier. In some embodiments, a chemical or biological agent is encapsulated in and/or contained throughout the particles. The present invention is not limited by the nature of the chemical or biological agents. Such agents include, but are not limited to, proteins, nucleic acid molecules, small molecule drugs, lipids, carbohydrates, cells, cell components, and the like. In some embodiments, two or more (e.g., 3, 4, 5, etc.) different chemical or biological agents are included on or within the carrier. In some embodiments, agents are configured for specific release rates. In some embodiments, multiple different agents are configured for different release rates. For example, a first agent may release over a period of hours while a second agent releases over a longer period of time (e.g., days, weeks, months, etc.). In some embodiments, the carrier or a portion thereof is configured for slow-release of biological or chemical agents. In some embodiments, the slow release provides release of biologically active amounts of the agent over a period of at least 30 days (e.g., 40 days, 50 days, 60 days, 70 days, 80 days, 90 days, 100 days, 180 days, etc.). In some embodiments, the carrier or a portion thereof is configured to be sufficiently porous to permit ingrowth of cells into the pores. The size of the pores may be selected for particular cell types of interest and/or for the amount of ingrowth desired.

[0155] Encapsulation of the antigen, biological, and/or chemical agents in the particle of the invention has been surprisingly found to induce immunological tolerance and has several advantages. First, the encapsulated particles have a slower cytokine response. Second, when using multiple antigens, biological, and/or chemical agents, encapsulation removes the competition between these various molecules that might occur if the agents were attached to the surface of the particle. Third, encapsulation allows more antigens, biological, and/or chemical agents to be incorporated with the particle. Fourth, encapsulation allows for easier use of complex protein antigens or organ homogenates (e.g., pancreas homogenate for type 1 diabetes or peanut extract in peanut allergy). Finally, encapsulation of antigens, biological, and/or chemical agents within the particle instead of conjugation to the surface of the particle maintains the net negative charge on the surface of the particle.

[0156] In some embodiments, the synthetic, biodegradable particles of the present invention provide ease of manufacturing, broad availability of therapeutic agents, and increased treatment sites. In particular embodiments, surface-functionalized biodegradable poly(lactide-co-glycolide) particles with a high density of surface carboxylate groups, synthesized using the surfactant poly(ethylene-alt-maleic anhydride) provide a carrier that offers numerous advantages over other carrier particles and/or surfaces. Experiments conducted during development of embodiments of the present invention demonstrated the conjugation of peptides (e.g., PLP₁₃₉₋₁₅₁ peptide) to these particles. Such peptide-coupled particles have shown that they are effective for the prevention of disease development and the induction of immunological tolerance (e.g., in the SJL/J PLP₁₃₉₋₁₅₁/CFA-induced R-EAE murine model of multiple sclerosis). Peptide coupled carriers of the present invention provide numerous advantages over other tolerance induction structures. In some embodiments, the particles are biodegradable, and therefore will not persist for long times in the body. The time for complete degradation can be controlled. In some embodiments, particles are functionalized to facilitate internalization without cell activation (e.g., phosphatidylserine loaded into PLG microspheres). In some embodiments, particles incorporate targeting ligands for a specific cell population. In some embodiments, anti-inflammatory cytokines such as IL-10 and TGF-β, are included on or within particles to limit activation of the cell type that is internalizing the particles and to facilitate the induction of tolerance via energy and/or deletion and the activation of regulatory T cells.

### Compositions

[0157] In some embodiments, the biodegradable particles encapsulating fusion proteins described herein may be formulated into a composition. As used herein, the term “composition” refers to a formulation of one or more particles encapsulating one or more fusion proteins that is capable of being administered to a subject and/or cell. In some embodiments, a composition may be comprised of a plurality of particles, each of which encapsulates the same fusion protein. In some embodiments, a composition may be comprised of a plurality of particles, each of which encapsulates one of two or more different fusion proteins. For example, a composition may be comprised of a plurality of particles each encapsulating one of 2, 3, 4, 5, 6, 7, 8, 9, 10 or more different fusion proteins. In some embodiments, compositions optionally further comprise one or more additional therapeutic agents. Alternatively, the particles of the current invention may be administered to a patient in need thereof in combination with the administration of one or more other therapeutic agents. For example, additional therapeutic agents for conjoint administration or inclusion in a pharmaceutical composition with a compound of this invention may be an approved anti-inflammatory agent, or it may be any one of a number of agents undergoing approval in the Food and Drug Administration that ultimately obtain approval for the treatment of any disorder characterized by an uncontrolled inflammatory immune response or a bacterial or viral infection. It will also be appreciated that particles of present invention can exist in free form for treatment, or where appropriate, as a pharmaceutically acceptable derivative thereof.

[0158] Composition formulations may include derivatives, prodrugs, solvates, stereoisomers, racemates, and/or tautomers of the particles described herein with any acceptable carriers, diluents, and/or excipients. A “therapeutic composition” or “pharmaceutical composition” (used interchangeably herein) is a composition of particles encapsulating one or more fusion proteins described herein capable of being administered to a patient and/or cell and resulting in a particular physiologic outcome (e.g., treatment of a particular disease or induction of antigen-specific tolerance).

[0159] As used herein “pharmaceutically acceptable carrier” or “pharmaceutically acceptable excipient” includes, without limitation, any adjuvant, carrier, excipient, glidant, sweetening agent, diluent, preservative, dye/colorant, flavor enhancer, surfactant, wetting agent, dispersing agent, suspending agent, stabilizer, isotonic agent, solvent, surfactant, and/or emulsifier suitable for use in contact with the tissues of human beings and animals without excessive toxicity, irritation, allergenicity, or other problems or complications. Exemplary pharmaceutically acceptable carriers include, but are not limited to, to sugars, such as lactose, glucose and sucrose; starches, such as corn starch and potato starch; cellulose, and its derivatives, such as sodium carboxymethyl cellulose, ethyl cellulose and cellulose acetate; tragacanth; malt; gelatin; talc; cocoa butter, waxes, animal and vegetable fats, paraffins, silicones, bentonites, silicic acid, zinc oxide; oils, such as peanut oil, cottonseed oil, safflower oil, sesame oil, olive oil, corn oil and soybean oil; glycols, such as propylene glycol; polyols, such as glycerin, sorbitol, mannitol and polyethylene glycol; esters, such as ethyl oleate and ethyl laurate; agar; buffering agents, such as magnesium hydroxide and aluminum hydroxide; alginic acid; pyrogen-free water; isotonic saline; Ringer's solution; ethyl alcohol; phosphate buffer solutions; and any other compatible substances employed in pharmaceutical formulations. Except insofar as any conventional media and/or agent is incompatible with the particles and/or fusion proteins of the present disclosure, its use in therapeutic compositions is contemplated.

[0160] “Pharmaceutically acceptable salt” includes both acid and base addition salts. Pharmaceutically-acceptable salts include the acid addition salts (formed with the free amino groups of the protein) and which are formed with inorganic acids such as, for example, hydrochloric acid, hydrobromic acid, sulfuric acid, nitric acid, phosphoric acid and the like, and organic acids such as, but not limited to, acetic acid, 2,2-dichloroacetic acid, adipic acid, alginic acid, ascorbic acid, aspartic acid, benzenesulfonic acid, benzoic acid, 4-acetamidobenzoic acid, camphoric acid, camphor-10-sulfonic acid, capric acid, caproic acid, caprylic acid, carbonic acid, cinnamic acid, citric acid, cyclamic acid, dodecylsulfuric acid, ethane-1,2-disulfonic acid, ethanesulfonic acid, 2-hydroxyethanesulfonic acid, formic acid, fumaric acid, galactaric acid, gentisic acid, glucoheptonic acid, gluconic acid, glucuronic acid, glutamic acid, glutaric acid, 2-oxo-glutaric acid, glycerophosphoric acid, glycolic acid, hippuric acid, isobutyric acid, lactic acid, lactobionic acid, lauric acid, maleic acid, malic acid, malonic acid, mandelic acid, methanesulfonic acid, mucic acid, naphthalene-1,5-disulfonic acid, naphthalene-2-sulfonic acid, 1-hydroxy-2-naphthoic acid, nicotinic acid, oleic acid, orotic acid, oxalic acid, palmitic acid, pamoic acid, propionic acid, pyroglutamic acid, pyruvic acid, salicylic acid, 4-aminosalicylic acid, sebacic acid, stearic acid, succinic acid, tartaric acid, thiocyanic acid, ptoluenesulfonic acid, trifluoroacetic acid, undecylenic acid, and the like. Salts formed with the free carboxyl groups can also be derived from inorganic bases such as, for example, sodium, potassium, lithium, ammonium, calcium, magnesium, iron, zinc, copper, manganese, aluminum salts and the like. Salts derived from organic bases include, but are not limited to, salts of primary, secondary, and tertiary amines, substituted amines including naturally occurring substituted amines, cyclic amines and basic ion exchange resins, such as ammonia, isopropylamine, trimethylamine, diethylamine, triethylamine, tripropylamine, diethanolamine, ethanolamine, decanol, 2-dimethylaminoethanol, 2-diethylaminoethanol, dicyclohexylamine, lysine, arginine, histidine, caffeine, procaine, hydrabamine, choline, betaine, benethamine, benzathine, ethylenediamine, glucosamine, methylglucamine, theobromine, triethanolamine, tromethamine, purines, piperazine, piperidine, N-ethylpiperidine, polyamine resins and the like. Particularly preferred organic bases are isopropylamine, diethylamine, ethanolamine, trimethylamine, dicyclohexylamine, choline and caffeine.

[0161] Wetting agents, emulsifiers and lubricants, such as sodium lauryl sulfate and magnesium stearate, as well as coloring agents, release agents, coating agents, sweetening, flavoring and perfuming agents, preservatives and antioxidants can also be present in the compositions.

[0162] Examples of pharmaceutically-acceptable antioxidants include water soluble antioxidants, such as ascorbic acid, cysteine hydrochloride, sodium bisulfate, sodium metabisulfite, sodium sulfite and the like; oil-soluble antioxidants, such as ascorbyl palmitate, butylated hydroxyanisole (BHA), butylated hydroxytoluene (BHT), lecithin, propyl gallate, alpha-tocopherol, and the like, and; metal chelating agents, such as citric acid, ethylenediamine tetraacetic acid (EDTA), sorbitol, tartaric acid, phosphoric acid, and the like.

[0163] Liquid dosage forms for oral administration include, but are not limited to, pharmaceutically acceptable emulsions, microemulsions, solutions, suspensions, syrups and elixirs. In addition to the active compounds, the liquid dosage forms may contain inert diluents commonly used in the art such as, for example, water or other solvents, solubilizing agents and emulsifiers such as ethyl alcohol, isopropyl alcohol, ethyl carbonate, ethyl acetate, benzyl alcohol, benzyl benzoate, propylene glycol, 1,3-butylene glycol, dimethylformamide, oils (in particular, cottonseed, groundnut, corn, germ, olive, castor, and sesame oils), glycerol, tetrahydrofurfuryl alcohol, polyethylene glycols and fatty acid esters of sorbitan, and mixtures thereof. Besides inert diluents, the oral compositions can also include adjuvants such as wetting agents, emulsifying and suspending agents, sweetening, flavoring, and perfuming agents. In some embodiments, the present invention provides for methods of inducing a particular physiological effect (e.g., modulation of an immune response/induction of antigen-specific tolerance) in a subject comprising administering an effective amount of a biodegradable particle or composition described herein. Thus, in one aspect, tolerogenic immune modifying particles are provided. Such tolerance-inducing particles comprise, at a minimum, two or more antigenic epitopes against which induction of tolerance is desired (e.g., an autoantigen, an allergen, and/or a transplant antigen), separated by linkers (e.g., protease-specific linkers). In another aspect activating immune modifying particles are provided. In one embodiment, such immune activating particles comprise two or more antigenic epitopes against which a protective immune response is desired (e.g., tumor antigens and/or infectious agents), separated by linkers (e.g., protease-specific linkers). In a particular embodiment, the activating immune modifying particles further comprise an immune activating agent. In one embodiment, the immune activating agent is a TLR agonist. In a particular embodiment, the immune activating agent is a TLR7, TLR3, or a TLR9 agonist. In a further embodiment, the immune activating agent is a TLR7 agonist.

[0164] Compositions may be formulated in a particular manner suitable for a desired administration route and/or to achieve a desired outcome. “Administration” refers to introducing or delivering a biodegradable particle or composition thereof to a subject or contacting a biodegradable particle or composition thereof with a cell or a sample. The term “sample” refers to a volume and/or mass obtained, provided, and/or subjected to analysis. In some embodiments, a sample comprises a tissue sample, cell sample, a fluid sample, and the like. In some embodiments, a sample is taken from a subject (e.g., a human or animal subject). In some embodiments, a tissue sample comprises a portion of tissue taken from any internal organ, a cancerous, pre-cancerous, or non-cancerous tumor, skin, hair (including roots), eye, muscle, bone marrow, cartilage, white adipose tissue, or brown adipose tissue. In some embodiments, a fluid sample comprises buccal swabs, blood, cord blood, saliva, semen, urine, ascites fluid, pleural fluid, spinal fluid, pulmonary lavage, tears, sweat, and the like. Those of ordinary skill in the art will appreciate that, in some embodiments, a “sample” is a “primary sample” in that it is obtained directly from a subject. In some embodiments, a “sample” is the result of processing of a primary sample, for example to remove certain potentially contaminating components and/or to isolate and/or purify certain components of interest.

[0165] Administration can occur by injection, irrigation, inhalation, consumption, electro-osmosis, hemodialysis, iontophoresis, and other methods known in the art. The particles and compositions of the present invention may be administered via any acceptable route including, but not limited to, orally, intravenously, sublingually, buccally, enterically, topically, rectally, subcutaneously, nasally, intraosseously (e.g., by intraosseous infusion), intraperitoneally, intrathecally, transdermally, or transmucosally. In particular embodiments, the particles of the invention are administered intravenously or subcutaneously.

[0166] The frequency of administration may be determined based on the desired physiologic outcome, the nature of the disorder to be treated and/or prevented, the severity of the disorder, and the subject's response to the formulation. In some aspects, administration of a composition occurs at least once. In further aspects, administration occurs more than once, for example 2, 3, 4, 5, 6, 7, 8, 9, 10 or more times in a given period. The dosage of each administration and/or frequency of administrations may be adjusted as necessary based on the patient's condition and physiologically responses. Where compositions are administered more than once, each administration may be performed by the same actor and/or in the same geographical location. Alternatively, each administration may be performed by a different actor and/or in a different geographical location.

[0167] In some embodiments, an effective amount of a particle and/or composition described herein is administered to a subject. The terms “subject” and “patient” are used interchangeably herein and refer to animals (e.g., mammals, swine, fish, birds, insects etc.) suitable for treatment with the particles and/or compositions described herein. In some embodiments, subjects are mammals, such as primates, humans, or rabbits; livestock, such as cattle, sheep, goats, cows, swine, and the like; poultry, such as chickens, ducks, geese, turkeys, and the like; domesticated animals, such as dogs and cats; rodents, such as mice, rats, or hamsters. In some embodiments, particularly in research contexts, the subject is a mouse. In some embodiments, the subject is a human.

[0168] The term “effective amount” refers the minimum amount of a biodegradable particle or composition required to induce a particular physiological effect. For example, an effective amount may be the minimum amount required to induce antigen-specific tolerance or to otherwise regulate an immune response. As described herein, regulation of an immune response may be humoral and/or cellular, and is measured using standard techniques in the art and as described herein. The effective amount of a given particle or composition depends on a variety of factors including the nature of the disorder being treated and the severity of the disorder; activity of the specific particle(s) or composition(s) employed; the age, body weight, general health, sex and diet of the subject; the time of administration, route of administration, and rate of excretion of the particle(s) or composition(s) employed; the duration of the treatment; drugs used in combination or coincidental with the particle(s) or composition(s) employed; the judgment of the prescribing physician or veterinarian; the size and physical characteristic of the particles or compositions; and like factors known in the art. Useful dosage ranges of the particles or compositions described herein may be, for example, from about any of the following: 0.5 to 10 mg/kg, 1 to 9 mg/kg, 2 to 8 mg/kg, 3 to 7 mg/kg, 4 to 6 mg/kg, 5 mg/kg, 1 to 10 mg/kg, 5 to 10 mg/kg. Alternatively, the dosage can be administered based on the number of particles. For example, useful dosages of the carrier, given in amounts of carrier delivered, may be, for example, about 10⁶, 10⁷, 10⁶, 10⁹, 10¹⁰, or greater number of particles per dose. The absolute amount given to each patient depends on pharmacological properties such as bioavailability, clearance rate and route of administration. Details of pharmaceutically acceptable carriers, diluents and excipients and methods of preparing pharmaceutical compositions and formulations are provided in Remmingtons Pharmaceutical Sciences 18^{th} Edition, 1990, Mack Publishing Co., Easton, Pa, USA., which is hereby incorporated by reference in its entirety.

[0169] In some embodiments, compositions of the present invention find use with one or more scaffolds, matrices, and/or delivery systems (See e.g., U.S. Pat. App. 2009/0238879; U.S. Pat. Nos. 7,846,466; 7,427,602; 7,029,697; 6,890,556; 6,797,738; 6,281,256; herein incorporated by reference in their entireties). In some embodiments, particles are associated with, adsorbed on, embedded within, conjugated to, etc. a scaffold, matrix, and/or delivery system (e.g., for delivery of chemical/biological material, cells, tissue, and/or an organ to a subject). In some embodiments, a scaffold, matrix, and/or delivery system (e.g., for delivery of chemical/biological material, cells, tissue, and/or an organ to a subject) comprises and/or is made from materials described herein.

[0170] In some embodiments, microporous scaffolds (e.g., for transplanting biological material (e.g., cells, tissue, etc.) into a subject) are provided. In some embodiments, microporous scaffolds are provided having thereon agents (e.g., extracellular matrix proteins, exendin-4) and biological material (e.g., pancreatic islet cells). In some embodiments, the scaffolds are used in the treatment of diseases (e.g., type 1 diabetes), and related methods (e.g., diagnostic methods, research methods, drug screening). In some embodiments, scaffolds are provided with the carrier particles described herein on and/or within the scaffold. In some embodiments, scaffolds are produced from antigen conjugated materials (e.g., antigen conjugated PLG).

[0171] In some embodiments, a scaffold and/or delivery system comprises one or more layers and/or has one or more chemical and/or biological entities/agents (e.g., proteins, peptide-conjugated particles, small molecules, cells, tissue, etc.), see, e.g., U.S. Patent Publication No. 2009/0238879; herein incorporated by reference in its entirety. In some embodiments, the particles described herein are co-administered with a scaffold delivery system to elicit induction of immunological tolerance to the scaffold and the associated materials. In some embodiments, microporous scaffold is administered to a subject with particles described herein on or within the scaffold. In some embodiments, particles described herein are coupled to a scaffold delivery system. In some embodiments, a scaffold delivery system comprises any of the carrier particles described herein.

[0172] It will also be appreciated that the particles and compositions of the present invention can be formulated and employed in combination therapies, that is, the particles and compositions can be formulated with or administered concurrently with, prior to, or subsequent to, one or more other desired therapeutics or medical procedures. The particular combination of therapies (e.g., combinations of therapeutic compound, and/or procedures) to employ in a combination regimen will take into account compatibility of the desired therapeutics and/or procedures and the desired therapeutic effect to be achieved. It will also be appreciated that the therapies employed may achieve a desired effect for the same disorder (for example, an inventive compound may be administered concurrently with another anti-inflammatory agent), or they may achieve different effects (e.g., control of any adverse effects).

[0173] In certain embodiments, the pharmaceutical compositions containing the modified particles of the present invention further comprise one or more additional therapeutically active ingredients (e.g., anti-inflammatory and/or palliative). For purposes of the invention, the term “palliative” refers to treatment that is focused on the relief of symptoms of a disease and/or side effects of a therapeutic regimen, but is not curative. For example, palliative treatment encompasses painkillers, anti-nausea medications and anti-sickness drugs.

[0174] In some embodiments, compositions described herein are administered along with (e.g., concurrent with, prior to, or following) an implant (e.g., device) and/or transplant (e.g., tissue, cells, organ) in order to mediate, negate, regulate and/or reduce the immune response associated with the implant and/or transplant.

### Methods of Use

[0175] In some embodiments, the present invention provides methods for inducing or otherwise regulating an existing immune response in a subject, preferably a mammal, more preferably a human, comprising administering to the subject the particles or compositions described herein. As used herein, the term “immune response” includes both innate immune responses and adaptive immune responses (e.g., T cell mediated and/or B cell mediated immune responses). In general, innate and adaptive immune responses are distinguished by the level of antigen specificity. For example, cells directly involved in the adaptive immune response (e.g., T cells and B cells) express T cell receptors (TCRs) and B cell receptors that are specific for a particular antigen. Thus, adaptive immune receptors are activated and respond to specific antigens (e.g., a specific epitope or component of a larger antigen). Conversely, cells of the innate immune express innate immune receptors (e.g. pattern recognition receptors (PRRs)) such as TLRs, CLRs, NLRs, RLRs, and others. PRRs are germ-line encoded and non-rearranging receptors that recognize broader types of antigens (e.g., CLRs generally recognize carbohydrate moieties, RLRs recognize viral nucleic acids). Thus, receptors of the innate immune system are activated and respond to a broad range of antigens and are not considered to be antigen-specific.

[0176] Cells involved in the immune response include lymphocytes, such as B cells and T cells (CD4⁺, CD8⁺, Th1, Th2, Th17, T regulatory cells); antigen presenting cells (APCs) including professional APCs such as dendritic cells, macrophages, B lymphocytes, Langerhans cells, and nonprofessional APCs such as keratinocytes, endothelial cells, astrocytes, fibroblasts, oligodendrocytes; natural killer cells, and; myeloid cells, such as macrophages, eosinophils, mast cells, basophils, and other granulocytes. Exemplary immune responses include T cell responses, e.g., T cell proliferation, T cell expansion, cytokine production, chemokine production, and T cell-mediated cellular cytotoxicity (e.g., responses mediated by CD8⁺ cytotoxic T cells (CTLs)). In addition, the term immune response includes immune responses that indirectly or directly mediate T cell activation or T cell suppression, such as migration, proliferation, and activation of APCs, and mechanisms of antigen presentation. The term immune response also includes immune responses that are indirectly affected by T cell activation, e.g., antibody production (humoral responses) and activation of cytokine responsive cells, e.g., macrophages, dendritic cells, neutrophils, mast cells, basophils, B cells, T cells themselves, and structural cells such as epithelial cells, endothelial cells, and/or other stromal cells. In some embodiments, the particles of the present invention are effective to reduce inflammatory cell trafficking to the site of inflammation.

[0177] “Regulating an immune response” may refer to the modulation of any aspect, or modulation of multiple aspects, of an immune response. In some embodiments, methods for regulating an immune response as provided herein include modulating an immunogenic, pro-inflammatory, or otherwise activating immune response (e.g., through the use of activating immune modifying particles). In such embodiments, the methods provided herein encompass specifically inducing a TH1, TH2, or TH17 response, reducing or inhibiting a T regulatory response, or a combination of these responses. Induction of a TH1 response encompasses increasing the expression of, e.g., IFNγ and/or IL-12, and/or increasing a population of TH1 cells (e.g., increasing the number or percentage of IFNγ⁺, IL-12⁺, and/or T-bet⁺ cells). Induction of a TH2 response encompasses increasing the expression of, e.g., IL-4, IL-5, IL-10, IL-13, or any combination thereof. Typically an increase in a TH2 response will comprise an increase in the expression of at least one of IL-4, IL-5, IL-10, or IL-13; more typically an increase in a TH2 response will comprise an increase in the expression of at least two of IL-4, IL-5, IL-10, or IL-13, most typically an increase in a TH2 response will comprise an increase in the expression of at least three of IL-4, IL-5, IL-10, or IL-13, while ideally an increase in a TH2 response will comprise an increase in the expression of all of IL-4, IL-5, IL-10, and IL-13. Induction of a TH2 response may also comprise increasing a population of TH2 cells (e.g., increasing the number or percentage of IL-4⁺, IL-5⁺, IL-10⁺, IL-13⁺, and/or GATA3⁺ cells). Induction of a TH17 response encompasses increasing the expression of, e.g., TGF-β, IL-6, IL-21, IL-23 or any combination thereof, and effects levels of IL-17, IL-21 and IL-22. Induction of a TH17 response may also comprise increasing a population of TH17 cells (e.g., increasing the number or percentage of IL-17⁺, IL-21⁺, IL-22⁺, and/or RORγt⁺ cells). Reduction of a T regulatory response encompasses decreasing expression of TGFβ, IL-10, or any combination thereof. Reduction of a T regulatory response may also comprise a reduction in a population of T regulatory cells (e.g., decreasing the number or percentage of TGFβ⁺, IL-10⁺, and/or FoxP3⁺ cells).

[0178] In some embodiments, methods for regulating an immune response as provided herein include modulating a regulatory, tolerogenic, or otherwise suppressive immune response (e.g., through the use of tolerogenic immune modifying particles). In such embodiments, the methods provided herein encompass specifically reducing a TH1, TH2, or TH17 response, increasing a T regulatory response, or a combination of these responses. Reduction of a TH1 response encompasses decreasing the expression of, e.g., IFNγ and/or IL-12, and/or decreasing a population of TH1 cells (e.g., decreasing the number or percentage of IFNγ⁺, IL-12⁺, and/or T-bet⁺ cells). Reduction of a TH2 response encompasses decreasing the expression of, e.g., IL-4, IL-5, IL-10, IL-13, or any combination thereof. Typically, decreasing a TH2 response will comprise a decrease in the expression of at least one of IL-4, IL-5, IL-10, or IL-13; more typically a decrease in a TH2 response will comprise a decrease in the expression of at least two of IL-4, IL-5, IL-10, or IL-13, most typically a decrease in a TH2 response will comprise a decrease in the expression of at least three of IL-4, IL-5, IL-10, or IL-13, while ideally a decrease in a TH2 response will comprise a decrease in the expression of all of IL-4, IL-5, IL-10, and IL-13. Reduction of a TH2 response may also comprise decreasing a population of TH2 cells (e.g., decreasing the number or percentage of IL-4⁺, IL-5⁺, IL-10⁺, IL-13⁺, and/or GATA3⁺ cells). Reduction of a TH17 response encompasses decreasing the expression of, e.g., TGF-β, IL-6, IL-21, IL-23 or any combination thereof, and effects levels of IL-17, IL-21 and IL-22. Reduction of a TH17 response may also comprise decreasing a population of TH17 cells (e.g., decreasing the number or percentage of IL-17⁺, IL-21⁺, IL-22⁺, and/or RORγt⁺ cells). Induction of a T regulatory response encompasses increasing the expression of TGFβ and/or IL-10. Induction of a T regulatory response may also comprise increasing a population of T regulatory cells (e.g., increasing the number or percentage of TGFβ⁺, IL-10⁺, and/or FoxP3⁺ cells).

[0179] As used herein, the terms “tolerance” or “immunological tolerance” refer to a state of unresponsiveness of the immune system. Immunological tolerance is critical in preventing aberrant (e.g., reactivity to autoantigens in the context of autoimmunity) and/or excessive immune responses. “Specific” immunological tolerance occurs when immunological tolerance is preferentially invoked against certain antigens in comparison with others. “Non-specific” immunological tolerance occurs when immunological tolerance is invoked indiscriminately against antigens which lead to an inflammatory immune response. “Quasi-specific” immunological tolerance occurs when immunological tolerance is invoked semi-discriminately against antigens which lead to a pathogenic immune response but not to others which lead to a protective immune response. In particular embodiments, the present invention provides for methods of inducing antigen-specific tolerance in a subject comprising administering an effective amount of a biodegradable particle or composition described herein. As used herein, “antigen-specific tolerance” refers to the insensitivity and/or unresponsiveness of a T cell to TCR-mediated stimulation by particular antigens.

[0180] Immunological tolerance is a result of both central and peripheral tolerance. Central tolerance refers to the positive and negative selection of T cells in the thymus that results in the selection of functional, antigen-specific T cells (positive selection) and the elimination of autoreactive T cells (negative selection). Peripheral tolerance refers to tolerance mechanisms present in the periphery (e.g., bone marrow, lymph nodes, spleen, and/or mucosal surfaces). Mechanisms of peripheral tolerance prevent aberrant responses by autoreactive T cells that have escaped thymic deletion and prevent excessive activation of immune responses to foreign antigens. Peripheral tolerance encompasses a variety of mechanisms including T cell anergy, activation-induced cell death of T cells, and mechanisms of immune suppression mediated by regulatory T cells.

[0181] As used herein, the term “anergy” refers to insensitivity of T cells to T cell receptor (TCR)-mediated stimulation. Such insensitivity is antigen-specific and generally persists after exposure to the antigenic peptide has ceased. T-cell anergy occurs when T cells are exposed to antigen and receive a first signal (e.g., a TCR- or CD3-mediated signal) in the absence of a second signal (e.g., a costimulatory signal). Under these conditions, re-exposure of the cells to the same antigen, even if re-exposure occurs in the presence of a costimulatory molecule, results in failure of the T cell to produce cytokines (e.g., IL-2) and subsequent failure to proliferate. Thus, a failure to produce cytokines prevents proliferation. Anergic T cells can, however, proliferate if cultured with cytokines (e.g., IL-2). T cell anergy can be observed by the lack of IL-2 production by T cells as measured by ELISA, or by a proliferation assay using an indicator cell line. Alternatively, a reporter gene construct can be used. For example, anergic T cells fail to initiate DL-2 gene transcription induced by a heterologous promoter under the control of the 5′ IL-2 gene enhancer or by a multimer of the API sequence that can be found within the enhancer (Kang et al. 1992 Science. 257:1134).

[0182] The terms “regulatory T cells,” “T regulatory cells,” and “T regs” are used interchangeably herein and T cells that suppress or prevent the induction of an immune response. The term T reg can refer to both natural (e.g., T regs that emerge from the thymus as suppressive cells) and induced Tregs (e.g., T regs that differentiate into suppressive cells in response to peripheral stimuli). Induced T regs can be divided into multiple sub-populations based on their expression of the transcription factor, FoxP3, cell surface markers, and cytokine production. In some embodiments, T regs may refer to induced T reg populations such as Tr1, Th3, CD8⁺ suppressor cells, and others. In particular embodiments, T regs may refer to Tr1 cells, which are defined as CD4⁺FoxP3⁻LAG3⁺IFNγ⁺IL-10⁺. In some embodiments, T reg-mediated suppression of an immune response may be antigen-specific or non-antigen specific. In some embodiments, T reg mediated suppression of an immune response may be a result of cytokine production by the T reg (e.g., the production of IL-10 and/or TGFβ) or by the production of another immunosuppressive mediator.

[0183] T regs play an important role in mediating and maintaining peripheral tolerance. See, for example, Walker et al. (2002) Nat. Rev. Immunol. 2: 11-19; Shevach et al. (2001) Immunol. Rev. 182:58-67. In some situations, peripheral tolerance to an autoantigen is lost (or broken) and an autoimmune response ensues. For example, in an animal model for EAE, activation of APCs through innate immune receptors such as Toll-like receptors was shown to break self-tolerance and result in the induction of EAE (Waldner et al. (2004) J. Clin. Invest. 113:990-997). Additionally, T regs can prevent excessive immune activation in the context of beneficial immune responses, such as those generated in response to a viral or bacterial infection. The regulation of these immune responses can therefore prevent excessive damage to healthy cells or tissues.

[0184] In some embodiments, immunological tolerance can be measured by decreased level of a specific immune response, for example those mediated at least in part by antigen-specific effector T lymphocytes, B lymphocytes, antibodies, or their equivalents; a delay in the onset or progression of a specific immune response; or a reduced risk of the onset or progression of a specific immune response. Immunological tolerance can be determined by methods performed on a proportion of treated subjects in comparison with untreated subjects, wherein T cell and/or B cell proliferation and/or activation, cytokine production, antibody production can be determined by methods known in the art (e.g., in vitro proliferation assays, flow cytometry, ELISA, Western blots, etc.).

[0185] In some embodiments, induction of an antigen-specific immune response comprises inducing an increase in tolerogenic activity. In some embodiments, an increase in tolerogenic activity includes expansion and/or proliferation of T regs. In some embodiments, an increase in tolerogenic activity includes increased production of regulatory cytokines such as IL-10 and/or TGFβ. A proxy for tolerogenic activity is the ability of an intact antigen or fragment to stimulate the production of an appropriate cytokine at the target site. The immunoregulatory cytokine released by T regulatory cells at the target site is thought to be TGF-β (Miller et al., Proc. Natl. Acad. Sci. USA 89:421, 1992). Other factors that may be produced during tolerance are the cytokines IL-4 and IL-10, and the mediator PGE. In contrast, lymphocytes in tissues undergoing activating immune responses secrete cytokines such as IL-1, IL-2, IL-6, and IFNγ. Hence, the ability of an antigen to induce a tolerogenic or an immunogenic response can be evaluated by measuring its ability to stimulate the production of immunoregulatory cytokines (e.g., TGFβ and/or IL-10) in comparison to immune-activating cytokines (e.g., IFNγ, IL-2, IL-6, IL-17, etc.).

[0186] In certain embodiments, the present invention relates to the priming of immune tolerance in a subject not previously tolerized by therapeutic intervention. In some embodiments, the invention relates to methods for reducing the incidence and/or severity of an aberrant immune response to a therapeutic protein in a subject. These embodiments generally involve a plurality of administrations of a combination of antigen and mucosal binding component. Typically, at least three administrations, frequently at least four administrations, and sometimes at least six administrations are performed during priming in order to achieve a long-lasting result, although the subject may show manifestations of tolerance early in the course of treatment. Most often, each dose is given as a bolus administration, but sustained formulations capable of mucosal release are also suitable. Where multiple administrations are performed, the time between administrations is generally between 1 day and 3 weeks, and typically between about 3 days and 2 weeks. Generally, the same antigen and mucosal binding component are present at the same concentration, and the administration is given to the same mucosal surface, but variations of any of these variables during a course of treatment may be accommodated.

[0187] In some embodiments, the methods of the present invention comprise inducing a protective immune response to a particular antigen, such as a target antigen. Such methods are particularly useful in the context of cancer therapeutics and infectious disease. In such embodiments, the methods comprise administration of particles encapsulating a fusion protein that includes two or more target antigens (such as a tumor antigen) separated by protease-specific linkers. In certain embodiments, the particles encapsulating linked epitopes further comprise an immune agonist. An immune agonist may comprise any of a protein, a hapten, a toxin, a lipid, and/or a nucleic acid and is capable of acting as an adjuvant to result in antigen-specific immune responses against the target antigen. An immune agonist may comprise a hapten, such as biotin, dinitrophenol, urushiol, fluoroscein and others. In some embodiments, an immune agonist may comprise a nucleic acid, including single-stranded (ss) and double stranded RNA and DNA, and modified forms thereof. In some embodiments, an immune agonist is a toxin. In some embodiments, the immune agonist is a protein such as an immune activating cytokine (e.g. IL-2, IL-12, IFNγ, IFNα, IFNβ, TNFα, etc.); a chemokine capable of recruiting T cells, antigen presenting cells, and/or granulocytes; an antibody or fragment thereof that binds to and inhibits an immune checkpoint receptor (e.g., PD1, PDL1, CTLA4, LAG3, TIM3, or A2aR).

[0188] In some embodiments, the immune agonist is an agonist of a CLR (e.g., DEC-205, DC-SIGN, DCIR, CLEC-1, Dectin1, Dectin2, or DLEC), a TLR (e.g., TLR1, TLR2, TLR3, TLR4, TLR5, TLR6, TLR7, TLR8, TLR9, TLR10, TLR11, TLR12, or TLR13), an NLR (e.g. NOD1, NOD2, NAIP, NLRC4, NLRC3, NLPR1, NLPR3, NLRP10), an RLR (e.g., MDA or, RIG1), STING, an inflammasome (e.g., NLPR3 or AIM2). In further embodiments, the immune agonist is a TLR7 or a TLR9 agonist. In further particular embodiments, the immune agonist results in the activation of CD8⁺ CTLs. In further embodiments, the immune agonist results in the cell-lysis of cells expressing the target antigen. In some embodiments, the target antigen is a tumor antigen such as CD19, CD20, BCMA, CD22, CLL1, CD33, CEA, CD123, CS1, EGFR, PSMA, EphA2, MCSP, ADAM17, PSCA, TPTE, HPU16, immature laminin receptor, TAG-72, HPV E6, HPV E7, BING-4, Calcium-activated chloride channel 2, cyclin B₁, 9D7, Ep-CAM, EphA3, Her2/Neu, telomerase, mesothelin, SAP-1, survivin, proteins of the BAGE family, proteins of the CAGE family, proteins of the GAGE family, proteins of the MAGE family (e.g., MAGE-A3), proteins of the SAGE family, proteins of the XAGE family, CT9, CT10, NY-ESO1/LAGE-1, PRAME, SSX-2, Melan-A/MART-1, Cp100/pmel17, tyrosinase, TRP-1/TRP-2, P.polypeptide, MC1R, prostate-specific antigen, β-catenin, BRCA1/2, CDK4, CML66, fibronectin, MART-2, p53, Ras, TGF-βRII, and MUC1.

[0189] Increased antigen-specific immune responses may be measured by increased antigen-specific effector T cell proliferation, increased production of pro-inflammatory and/or immune activating cytokines (e.g., IFNγ or IFNα), or increased cell lysis of cells expressing the target antigen.

[0190] In further embodiments, methods are provided for the treatment of a particular disease or disorder. “Treating” and “treatment” as used herein refer to an improvement of a disease, or a symptom of a disease, and may be a measureable or observable improvement, or an improvement in the general well-being of the subject. In particular embodiments, treating a particular disease or disorder refers to inducing antigen-specific tolerance or otherwise increasing a regulatory immune response to decrease or ameliorate pathologic inflammation (e.g., in the context of an autoimmune disease).

[0191] In some embodiments, the invention relates to uses of the particles and compositions described herein prior to the onset of disease. In other embodiments, the invention relates to uses of the particles and compositions described herein to inhibit ongoing disease. In some embodiments, the invention relates to ameliorating disease in a subject. By ameliorating disease in a subject is meant to include treating, preventing or suppressing the disease in the subject.

[0192] In some embodiments, the invention relates to preventing the relapse of disease. For example, an unwanted immune response can occur at one region of a peptide (such as an antigenic determinant). Relapse of a disease associated with an unwanted immune response can occur by having an immune response attack at a different region of the peptide. T-cell responses in some immune response disorders, including MS and other Th1/17-mediated autoimmune diseases, can be dynamic and evolve during the course of relapsing-remitting and/or chronic-progressive disease. The dynamic nature of the T cell repertoire has implications for treatment of certain diseases, since the target may change as the disease progresses. Previously, pre-existing knowledge of the pattern of responses was necessary to predict the progression of disease. The present invention provides compositions that can prevent the effect of dynamic changing disease, a function of “epitope spreading.” A known model for relapse is an immune reaction to proteolipid protein (PLP) as a model for multiple sclerosis (MS). Initial immune response can occur by a response to PLP139-15. Subsequent disease onset can occur by a relapse immune response to PLP[pi]s-iβi. The compositions of the present invention are particularly useful for the treatment of MS and other autoimmune diseases where disease-causing epitopes are present in multiple proteins (e.g., PLP, MBP, and MOG) or where multiple disease-causing epitopes reside on a single protein and encapsulation of the whole protein is not otherwise possible.

[0193] In certain embodiments, the subject suffers from a disorder associated with unwanted immune activation, such as allergic disease or condition, allergy, and asthma. A subject having an allergic disease or asthma is a subject with a recognizable symptom of an existing allergic disease or asthma. Tolerance can be induced in such a subject, for example, by particles complexed with the specific foods (e.g., peanut proteins, etc.), injected substances (e.g., bee venom proteins, etc.), or inhaled substances (e.g., ragweed pollen proteins, pet dander proteins, etc.) which elicit the allergic reaction.

[0194] In certain embodiments, the subject suffers from a disorder associated with unwanted immune activation, such as autoimmune disease and inflammatory disease. A subject having an autoimmune disease or inflammatory disease is a subject with a recognizable symptom of an existing autoimmune disease or inflammatory disease. Tolerance can be induced in such a subject, for example, by particles complexed with the relevant autoantigens driving the particular autoimmune disease.

[0195] In certain embodiments, the subject suffers from a disorder associated with enzyme replacement therapy. Tolerance can be induced in such a subject, for example, by particles complexed with the enzymes which patients with genetic deficiencies fail to produce, to prevent them from making neutralizing antibody responses to recombinantly-produced enzymes administered to treat their particular deficiency, e.g. tolerance to human Factor VIII in patients with hemophilia due to a genetic deficiency in the ability to make Factor VIII.

[0196] In certain embodiments, the subject suffers from a disorder associated with disease therapy. In the case of recombinant antibodies, tolerance is induced for example, to a humanized antibody being employed in a therapeutic context to prevent a patient from making neutralizing antibodies against the antibody therapeutic, e.g. tolerance to a humanized immune subset depleting antibody or anti-cytokine antibody being used as a treatment for autoimmune disease.

[0197] Autoimmune diseases can be divided in two broad categories: organ-specific and systemic. Autoimmune diseases include, without limitation, rheumatoid arthritis (RA), systemic lupus erythematosus (SLE), type I diabetes mellitus, type II diabetes mellitus, multiple sclerosis (MS), immune-mediated infertility such as premature ovarian failure, scleroderma, Sjogren's disease, vitiligo, alopecia (baldness), polyglandular failure, Grave's disease, hypothyroidism, polymyositis, pemphigus vulgaris, pemphigus foliaceus, inflammatory bowel disease including Crohn's disease and ulcerative colitis, autoimmune hepatitis including that associated with hepatitis B virus (HBV) and hepatitis C virus (HCV), hypopituitarism, graft-versus-host disease (GvHD), myocarditis, Addison's disease, autoimmune skin diseases, uveitis, pernicious anemia, Celiac disease, and hypoparathyroidism.

[0198] Autoimmune diseases may also include, without limitation, Hashimoto's thyroiditis, Type I and Type II autoimmune polyglandular syndromes, paraneoplastic pemphigus, bullous pemphigoid, dermatitis herpetiformis, linear IgA disease, epidermolysis bullosa acquisita, erythema nodosa, pemphigoid gestationis, cicatricial pemphigoid, mixed essential cryoglobulinemia, chronic bullous disease of childhood, hemolytic anemia, thrombocytopenic purpura, Goodpasture's syndrome, autoimmune neutropenia, myasthenia gravis, Eaton-Lambert myasthenic syndrome, stiff-man syndrome, acute disseminated encephalomyelitis, Guillain-Barre syndrome, chronic inflammatory demyelinating polyradiculoneuropathy, multifocal motor neuropathy with conduction block, chronic neuropathy with monoclonal gammopathy, opsoclonus-myoclonus syndrome, cerebellar degeneration, encephalomyelitis, retinopathy, primary biliary sclerosis, sclerosing cholangitis, gluten-sensitive enteropathy, ankylosing spondylitis, reactive arthritides, polymyositis/dermatomyositis, mixed connective tissue disease, Bechet's syndrome, psoriasis, polyarteritis nodosa, allergic anguitis and granulomatosis (Churg-Strauss disease), polyangiitis overlap syndrome, hypersensitivity vasculitis, Wegener's granulomatosis, temporal arteritis, Takayasu's arteritis, Kawasaki's disease, isolated vasculitis of the central nervous system, thromboangiitis obliterans, sarcoidosis, glomerulonephritis, and cryopathies. These conditions are well known in the medical arts and are described, for example, in Harrison's Principles of Internal Medicine, 14th ed., Fauci A S et al., eds., New York: McGraw-Hill, 1998.

[0199] Animal models for the study of autoimmune disease are known in the art. For example, animal models which appear most similar to human autoimmune disease include animal strains which spontaneously develop a high incidence of the particular disease. Examples of such models include, but are not limited to, the non-obese diabetic (NOD) mouse, which develops a disease similar to type 1 diabetes, and lupus-like disease prone animals, such as New Zealand hybrid, MRL-Fas^{lpr} and BXSB mice. Animal models in which an autoimmune disease has been induced include, but are not limited to, EAE (a murine model of multiple sclerosis), collagen-induced arthritis (CIA, a murine model of rheumatoid arthritis), and experimental autoimmune uveitis (EAU, a murine model of uveitis). Animal models for autoimmune disease have also been created by genetic manipulation and include, for example, IL-2/IL-10 knockout mice for inflammatory bowel disease, Fas or Fas ligand knockout for SLE, and IL-1 receptor antagonist knockout for rheumatoid arthritis.

[0200] In certain embodiments, the subject suffers from an infection. A subject having a bacterial, fungal, parasitic, or viral infection is a subject with a recognizable symptom of an existing bacterial, fungal, parasitic, or viral infection. Infectious agents include, but are not limited to, bacterial, fungal, parasitic, and viral agents. Examples of such infectious agents include the following: staphylococcus, methicillin-resistant Staphylococcus aureus, Escherichia coli, streptococcaceae, neisseriaaceae, cocci, enterobacteriaceae, enterococcus, vancomycin-resistant enterococcus, cryptococcus, histoplasmosis, aspergillus, pseudomonadaceae, vibrionaceae, campylobacter, pasteurellaceae, bordetella, francisella, brucella, legionellaceae, bacteroidaceae, gram-negative bacilli, clostridium, corynebacterium, propionibacterium, gram-positive bacilli, anthrax, actinomyces, nocardia, mycobacterium, treponema, borrelia, leptospira, mycoplasma, ureaplasma, rickettsia, chlamydiae, candida, systemic mycoses, opportunistic mycoses, protozoa, nematodes, trematodes, cestodes, adenoviruses, herpesviruses (including, for example, herpes simplex virus and Epstein Barr virus, and herpes zoster virus), poxviruses, papovaviruses, hepatitis viruses, (including, for example, hepatitis B virus and hepatitis C virus), papilloma viruses, orthomyxoviruses (including, for example, influenza A, influenza B, and influenza C), paramyxoviruses, coronaviruses, picomaviruses, reoviruses, togaviruses, flaviviruses, bunyaviridae, rhabdoviruses, rotavirus, respiratory syncitial virus, human immunodeficiency virus and retroviruses. Exemplary infectious diseases include but are not limited to candidiasis, candidemia, aspergillosis, streptococcal pneumonia, streptococcal skin and oropharyngeal conditions, gram negative sepsis, tuberculosis, mononucleosis, influenza, respiratory illness caused by Respiratory Syncytial Virus, malaria, schistosomiasis, and trypanosomiasis.

[0201] In some embodiments, the viral infection is a herpes virus infection, hepatitis virus infection, West Nile virus infection, flavivirus infection, influenza virus infection, rhinovirus infection, papillomavirus infection, paramyxovirus infection, parainfluenza virus infection, and/or a retrovirus infection. Preferred viruses are those viruses that infect the central nervous system of the subject. Most preferred viruses are those that cause encephalitis or meningitis.

[0202] In some embodiments, the bacterial infection is a Staphylococcus infection, Streptococcus infection, mycobacterial infection, Bacillus infection, Salmonella infection, Vibrio infection, Spirochete infection, and Neisseria infection. Preferred are bacteria that infect the central nervous system of the subject. Most preferred are bacteria that cause encephalitis or meningitis.

[0203] Other embodiments of this invention relate to transplantation. Transplantation refers to the transfer of a sample or graft from a donor subject to a recipient subject, and is frequently performed on human recipients who need the tissue in order to restore a physiological function provided by the tissue. Tissues that are transplanted include (but are not limited to) whole organs such as kidney, liver, heart, lung; organ components such as skin grafts and the cornea of the eye; and cell suspensions such as bone marrow cells and cultures of cells selected and expanded from bone marrow or circulating blood, and whole blood transfusions.

[0204] A serious potential complication of any transplantation ensues from antigenic differences between the host recipient and the engrafted tissue. Depending on the nature and degree of the difference, there may be a risk of an immunological assault of the graft by the host, or of the host by the graft, or both, may occur. The extent of the risk is determined by following the response pattern in a population of similarly treated subjects with a similar phenotype, and correlating the various possible contributing factors according to well accepted clinical procedures. The immunological assault may be the result of a preexisting immunological response (such as preformed antibody), or one that is initiated about the time of transplantation (such as the generation of TH cells). Antibody, TH cells, or Tc cells may be involved in any combination with each other and with various effector molecules and cells. However, the antigens which are involved in the immune response are generally not known, therefore posing difficulties in designing antigen-specific therapies or inducing antigen-specific tolerance.

[0205] Certain embodiments of the invention relate to decreasing the risk of host versus graft disease, leading to rejection of the tissue graft by the recipient. The treatment may be performed to prevent or reduce the effect of a hyperacute, acute, or chronic rejection response. Treatment is preferentially initiated sufficiently far in advance of the transplant so that tolerance will be in place when the graft is installed; but where this is not possible, treatment can be initiated simultaneously with or following the transplant. Regardless of the time of initiation, treatment will generally continue at regular intervals for at least the first month following transplant. Follow-up doses may not be required if a sufficient accommodation of the graft occurs, but can be resumed if there is any evidence of rejection or inflammation of the graft. Of course, the tolerization procedures of this invention may be combined with other forms of immunosuppression to achieve an even lower level of risk.

[0206] In some embodiments, the present invention provides methods of treating cancer in a subject. “Cancer” herein refers to or describes the physiological condition in mammals that is typically characterized by unregulated cell growth. Examples of cancer include but are not limited to carcinoma, lymphoma, blastoma, sarcoma (including liposarcoma, osteogenic sarcoma, angiosarcoma, endotheliosarcoma, leiomyosarcoma, chordoma, lymphangiosarcoma, lymphangioendotheliosarcoma, rhabdomyosarcoma, fibrosarcoma, myxosarcoma, chondrosarcoma), neuroendocrine tumors, mesothelioma, synovioma, schwannoma, meningioma, adenocarcinoma, melanoma, and leukemia or lymphoid malignancies. More particular examples of such cancers include squamous cell cancer (e.g. epithelial squamous cell cancer), lung cancer including small-cell lung cancer, non-small cell lung cancer, adenocarcinoma of the lung and squamous carcinoma of the lung, small cell lung carcinoma, cancer of the peritoneum, hepatocellular cancer, gastric or stomach cancer including gastrointestinal cancer, pancreatic cancer, glioblastoma, cervical cancer, ovarian cancer, liver cancer, bladder cancer, hepatoma, breast cancer, colon cancer, rectal cancer, colorectal cancer, endometrial or uterine carcinoma, salivary gland carcinoma, kidney or renal cancer, prostate cancer, vulvar cancer, thyroid cancer, hepatic carcinoma, anal carcinoma, penile carcinoma, testicular cancer, esophageal cancer, tumors of the biliary tract, Ewing's tumor, basal cell carcinoma, adenocarcinoma, sweat gland carcinoma, sebaceous gland carcinoma, papillary carcinoma, papillary adenocarcinomas, cystadenocarcinoma, medullary carcinoma, bronchogenic carcinoma, renal cell carcinoma, hepatoma, bile duct carcinoma, choriocarcinoma, seminoma, embryonal carcinoma, Wilms' tumor, testicular tumor, lung carcinoma, bladder carcinoma, epithelial carcinoma, glioma, astrocytoma, medulloblastoma, craniopharyngioma, ependymoma, pinealoma, hemangioblastoma, acoustic neuroma, oligodendroglioma, meningioma, melanoma, neuroblastoma, retinoblastoma, leukemia, lymphoma, multiple myeloma, Waldenstrom's macroglobulinemia, myelodysplastic disease, heavy chain disease, neuroendocrine tumors, Schwannoma, and other carcinomas, as well as head and neck cancer.

[0207] In some embodiments, the present invention provides methods of treating allergy in a subject. “Allergy,” as used herein, includes all immune reactions mediated by IgE as well as those reactions that mimic IgE-mediated reactions. Allergies are induced by allergens, including proteins, peptides, carbohydrates, and combinations thereof, that trigger an IgE or IgE-like immune response. Allergies include food allergies (e.g., nut, milk, egg, fish, shellfish, wheat, or soy allergies). Exemplary food allergens include Ara h 1, Ara h 2, and Ara h 3 epitopes in peanuts; the 15 kd antigen in celery; apple antigen Mal d 1; Pru p3 in peach, and; α-gliadin and γ-gliadin epitopes in gluten. Allergies also include other environmental allergies (e.g., pollen, insect sting, dust, mold, fungal allergies, etc.). Exemplary environmental allergens include urushiol in poison ivy and oak; house dust antigen; birch pollen components Bet v 1 and Bet v 2; Timothy grass pollen allergen Phl p 1; Lol p 3, Lol p I, or Lol p V in Rye grass; Cyn d 1 in Bermuda grass; dust mite allergens dust mite Der p1, Der p2, or Der f1; bee venom phospholipase A2, and; Japanese cedar pollen

[0208] Various modification, recombination, and variation of the described features and embodiments will be apparent to those skilled in the art without departing from the scope and spirit of the invention. Although specific embodiments have been described, it should be understood that the invention as claimed should not be unduly limited to such specific embodiments. Indeed, various modifications of the described modes and embodiments that are obvious to those skilled in the relevant fields are intended to be within the scope of the following claims.

### EXAMPLES

[0209] The following examples are provided to further illustrate the advantages and features of the invention, but are not intended to limit the scope of this disclosure.

### Example 1—Characterization of PLG Particles Encapsulating Peptide Epitopes

[0210] Experiments were performed to determine the physical and functional characteristics of PLG particles encapsulating different peptide epitopes. A listing of tolerogenic and control epitopes is shown in FIG. 2. As an example, PLG particles encapsulating PLP₁₃₉₋₁₅₁ were generated and the size distribution and Zeta potential were determined by light scattering. The peak of the size distribution for PLG particles encapsulating PLP₁₃₉₋₁₅₁ was 748.9 nm and the Z-average size was 882.6 nm, indicating the presence of larger species as well (FIG. 3A). Further, the PLG particles encapsulating PLP₁₃₉₋₁₅₁ had a very negative charge (Z-potential=−97.5 mV, FIG. 3B), likely due to the use of poly(ethylene-co-maleic acid) (PEMA) as an emulsifying agent.

[0211] The effects of PLG nanoparticles encapsulating different peptide epitopes on cell proliferation were then determined. 2×10⁵ Splenocytes from DO11.10 transgenic mice (TCR transgenic mice specific for Ova323) were incubated with PLG nanoparticles encapsulating PLP₁₃₉₋₁₅₁ (0.737 ng/μg) or Ova₃₂₃₋₃₃₉ (1.729 ng/μg) individually or PLG nanoparticles encapsulating PLP₁₃₉₋₁₅₁ and Ova₃₂₃₋₃₃₉ together (0.615 ng/μg). Nanoparticles and splenocytes were plated with or without Ova323 (1 μg) and allowed to grow for 2 days, then pulsed with thymidine and cultured for an additional 3 days. Exposure of cells to Ova323 in the absence of nanoparticles resulted in increased cell proliferation (FIG. 4B). However, treatment of cells exposed to Ova323 with nanoparticles encapsulating Ova₃₂₃₋₃₃₉ individually or nanoparticles encapsulating PLP₁₃₉₋₁₅₁ and Ova₃₂₃₋₃₃₉ together significantly reduced cell proliferation (FIG. 4B). Cells that were not exposed to Ova323 did not proliferate (FIG. 4A, negative control).

[0212] Similar experiments were performed using nanoparticles encapsulating different amounts of Ova₃₂₃₋₃₃₉ (1.1 ng/μg, 23.1 ng/μg, 0.2 ng/μg) or nanoparticles encapsulating full length Ova (FIG. 5). In the absence of addition of the Ova₃₂₃ peptide to the culture, only cells incubated with the nanoparticles encapsulating the greatest amount of Ova₃₂₃₋₃₃₉ peptide (23.1 ng/μg) or full length Ova proliferated (FIG. 5B). Further, the nanoparticles encapsulating the greatest amount of Ova₃₂₃₋₃₃₉ peptide did not inhibit proliferation induced by the addition of Ova323 to the culture at day 2 (FIG. 5C). However, higher doses of nanoparticles encapsulating lower amounts of Ova₃₂₃₋₃₃₉ (1.1 ng/μg and 0.2 ng/μg) reduced the level of cell proliferation induced by Ova323 (FIG. 5C). Addition of αCD28 to the cultures did not significantly affect cell proliferation, indicating that the proliferation in response to Ova323 was antigen-specific. These results indicate nanoparticles encapsulating peptide epitopes can modulate antigen-induced cell proliferation.

[0213] Further, a variety of peptide epitopes can be encapsulated in nanoparticles. For example, FIG. 6 and FIG. 7 show the encapsulation efficiency of tolerogenic and control peptide epitopes, respectively. The peptide epitopes may be encapsulated individually or together. Batches were aliquoted into pre-weighed tubes, dried and weighed to determine the mg/tube of particles. mass in pre-weighed tubes. μg peptide/mg particle was determined using a 3-(4-carboxybenzoyl)quinoline-2-carboxaldehyde (CBQCA) protein quantification assay.

### Example 2—Nanoparticles Encapsulating PLP₁₃₉₋₁₅₁ Peptide Epitopes Modulate Type 1 T Regulatory Cell Populations

[0214] Experiments were performed to assess the effects of nanoparticles encapsulating peptide epitopes on different cell populations using ex vivo assays. Briefly, 3.5×10⁶ CD4⁺ cells from PLP₁₃₉₋₁₅₁ TCR transgenic mice (5B6 mice, donors, Thy1.1⁺) were transferred intravenously into näive, 6-8 week old female SJL recipient mice on day −2. On day 0, SJL recipient mice were infused with either PLG nanoparticles encapsulating PLP₁₃₉₋₁₅₁ SE or PLG nanoparticles encapsulating OVA₃₂₃₋₃₃₉-SE (control particles). Spleens were harvested from recipient mice 3 and 5 days post-infusion, and regulatory T Cell populations were analyzed by flow cytometry (FIG. 8). All populations were gated on CD90.1/Thy1.1⁺ cells to select for the PLP₁₃₉₋₁₅₁-TCR⁺ populations.

[0215] Percentages of Type 1 regulatory T cells (TR1) were determined by gating first for Lag3⁺FoxP3⁻ cells in mice injected with OVA₃₂₃₋₃₃₉-SE PLG or PLP₁₃₉₋₁₅₁-SE PLG on Day 3 (FIG. 8A, left panels) and Day 5 (FIG. 8A, right panels). No difference in the Lag3⁺FoxP3⁻ population was observed at Day 3. However, there was a clear expansion of the Lag3⁺FoxP3⁻ population by Day 5 in the PLP₁₃₉₋₁₅₁-PLG infused animals relative to OVA₃₂₃₋₃₃₉-SE PLG controls. These cells are also largely IFNγ⁺IL-10⁺, indicating that they have a TR1 phenotype (FIG. 8A, bottom panel). Quantification of the number of Lag3⁺FoxP3⁻ cells showed no difference between PLP₁₃₉₋₁₅₁-PLG treated and OVA₃₂₃₋₃₃₉-SE PLG-treated mice. However, PLP₁₃₉₋₁₅₁-PLG treated mice showed a significant increase in the number of antigen-specific TR1 cells (LAG3⁺FoxP3⁻IFNγ⁺IL-10⁺) compared to OVA₃₂₃₋₃₃₉-SE PLG-treated controls. Similar experiments were done with spleens harvested at day 3, 5, and 7 post-infusion of PLP₁₃₉₋₁₅₁-SE PLG or OVA₃₂₃₋₃₃₉-SE PLG (FIG. 9). Similar to the results in FIG. 8, the number of TR1 cells was significantly increased in mice treated with PLP₁₃₉₋₁₅₁-PLG. These data demonstrate that PLG nanoparticles encapsulating peptide epitopes increase the number of regulatory T cells, indicating a potential therapeutic role in tolerance induction.

[0216] Separate experiments were performed according to the same protocol and splenic regulatory T cells were analyzed by flow cytometry. Cells were gated on CD90.1/Thy1.1 (PLP₁₃₉₋₁₅₁TCR⁺) populations as above and analyzed for expression of the regulatory T cell markers CD25, FoxP3, Helios, NP1, and IFNγ. As shown in FIG. 10, infusion of PLP₁₃₉₋₁₅₁-PLG increased the number of CD25⁺FoxP3⁺, Helios⁺NP1⁺, and IFNγ⁺ regulatory T cell populations. These results further support the conclusion that PLG nanoparticles encapsulating peptide epitopes have a potential therapeutic role in tolerance induction.

[0217] The ability of PLG nanoparticles encapsulating peptide epitopes to modulate disease activity was tested in EAE, a mouse model of multiple sclerosis. Briefly, 3.5×10⁶ CD4⁺ cells from 5B6 donors were transferred intravenously into naïve, 6-8 week old, female SJL mice on day −2. On Day 0, SJL recipient mice were infused with either PLP₁₃₉₋₁₅₁-SE PLG or control OVA₃₂₃₋₃₃₉-SE PLG. Spleens were harvested from mice on days +3 and +5 relative to infusion. EAE was induced in a separate cohort on day 7, and spleens were harvested from these mice for analysis on days 5 and 17 after EAE induction. Splenic T cell populations were then analyzed by flow cytometry. Cell populations were gated on CD90.1/Thy1.1 (PLP₁₃₉₋₁₅₁TCR⁺) populations (FIG. 11A). As shown, infusion with PLP₁₃₉₋₁₅₁-SE PLG significantly increased the number of antigen-specific T cells compared to OVA₃₂₃₋₃₃₉-SE PLG-infused controls at later time point in both EAE and non-EAE mice (FIG. 11A). Further, infusion with PLP₁₃₉₋₁₅₁-SE PLG significantly increased the number of proliferating antigen-specific T cells (FIG. 11B) and the number of antigen-specific regulatory T cells compared to OVA₃₂₃₋₃₃₉-SE PLG-infused controls (FIG. 11C). There was no significant difference in the number of non-antigen specific regulatory T cells (FIG. 11D). These results indicate that PLP₁₃₉₋₁₅₁-SE PLG resulted in the increased proliferation of antigen-specific T regulatory cells, indicating that nanoparticles encapsulating peptide epitopes to mediate tolerogenic responses in models of autoimmunity.

### Example 3—Nanoparticles Encapsulating OVA₃₂₃₋₃₃₉ Peptide Epitopes Modulate Type 1 T Regulatory Cell Populations

[0218] Complementary experiments were performed, wherein 2.5×10⁶ CD4⁺ cells from OVA₃₂₃₋₃₃₉ TCR donors (DO11 mice) were transferred intravenously into naïve female Balb/c RAG KO recipient mice, aged 6-8 weeks. Two weeks after transfer, recipient mice were infused with either OVA₃₂₃₋₃₃₉-SE PLG or PLP₁₃₉₋₁₅₁-SE PLG (control). Spleens were harvested from mice on day post-infusion, and regulatory T Cell populations were analyzed by flow cytometry (FIG. 12). Cell populations were on DO11-TCR⁺ populations. As shown, there was a significant increase in both the percentage (FIG. 12A) and total number (FIG. 12B) of CD25⁺FoxP3⁺CD4⁺ T cells from OVA₃₂₃₋₃₃₉-PLG-infused animals relative to PLP₁₃₉₋₁₅₁-SE PLG-infused controls. In similar experiments, the percentage (FIG. 13A) and number (FIG. 13B) of IFNγ-producing antigen-specific regulatory T cells was also significantly increased in OVA₃₂₃₋₃₃₉-PLG-infused animals relative to PLP₁₃₉₋₁₅₁-SE PLG-infused controls. There was no significant difference in the number of IFNγ⁺ non-regulatory T cells between experimental and control groups (FIG. 13). Further, there was a trend toward increased percentages (FIG. 14A) and numbers (FIG. 14B) of TR1 populations from DO11 donors, similar to the trend seen with the 5B6 CD90.1⁺TR1 cells isolated from SJL mice.

[0219] There was also an increase in the number of proliferating antigen-specific cells (FIG. 15A), the number of proliferating antigen-specific T regulatory cells (FIG. 15B) and the number of proliferating antigen specific TR1 cells (FIG. 15C, from a separate experiment, not confirmed as FoxP3⁻). These results indicate that, similar to the 5B6-transfer experiments in Example 2, PLG nanoparticles encapsulating peptide epitopes regulate the expansion of T regulatory cell populations, indicating a role in the induction of tolerance.

### Example 4—Characterization of Nanoparticles Encapsulating PLP139-Ova323 Fusion Peptides

[0220] Fusion peptides of the PLP₁₃₉₋₁₅₁ and OVA₃₂₃₋₃₃₉ epitopes linked by a peptide linker comprising a cathepsin-specific cleavage site were generated (FIG. 16, PLP139-Ova323 fusion peptide). 2×10⁵ splenocytes from DO11.10 (FIG. 17A) or 5B6 (FIG. 17B) transgenic mice were plated with varying amounts of OVA₃₂₃₋₃₃₉, PLP₁₃₉₋₁₅₁, OVA₃₂₃₋₃₃₉+PLP₁₃₉₋₁₅₁, or PLP139-Ova323 fusion peptide (linker) and cell proliferation was assessed. The PLP139-Ova323 fusion peptide induced cell proliferation that was comparable to the responses induced by OVA₃₂₃₋₃₃₉ in DO11 cells and PLP₁₃₉₋₁₅₁ in 5B6 cells. These results indicate that the fusion protein is capable of modulating cellular responses, similar to either epitope alone or in combination.

[0221] The physical characteristics (Z-Avg diameter, PDI, Peak diameter, and zeta potential) of nanoparticles encapsulating the PLP139-Ova323 fusion peptide were determined by dynamic light scattering (DLS) (FIG. 18). The Z-Avg diameter ranged from 1203-3316 nm over three attempts and the zeta potential was between −95 and −115 mV. Images of the nanoparticles were also obtained using transmission electron microscopy (TEM) with particles dried on carbon-coated copper mesh grids (FIG. 18).

[0222] The effects of the nanoparticles on cell proliferation were assessed by plating 2×10⁵ DO11 splenocytes with 1-100 μg of nanoparticles (nanoparticles encapsulating PLP139-Ova323 fusion, PLP₁₃₉₋₁₅₁, or OVA₃₂₃₋₃₃₉). Cells were allowed to grow for 2 days and were then pulsed with thymidine and cultured for an additional 3 days. Treatment of cells with either PLP139-Ova323 fusion or OVA₃₂₃₋₃₃₉ encapsulated nanoparticles resulted in increased cellular proliferation compared to untreated controls (FIG. 19A). Similar results were observed when 1 μg Ova₃₂₃ (FIG. 19B) or 1 μg Ova₃₂₃ and 1 μg/mL αCD28 (FIG. 19C) were added to the culture on Day 2.

[0223] Complementary experiments were performed with 5B6 splenocytes (FIG. 20). 2×10⁵ 5B6 splenocytes were plated and allowed to grow for 2 days, then pulsed with thymidine and cultured for an additional 3 days. Treatment of cells with nanoparticles encapsulating either PLP139-Ova323 fusion or PLP₁₃₉₋₁₅₁ resulted in increased cell proliferation at higher doses, compared to untreated controls or cells treated with nanoparticles encapsulating OVA₃₂₃₋₃₃₉ (FIG. 20A). Similar results were observed when 1 μg PLP139 (FIG. 20B) or 1 μg PLP139 and 1 μg/mL αCD28 (FIG. 20C) were added to the culture on Day 2. These data demonstrate that the linked-epitope protein fusions are immunogenic and suggest that they have increased immune modulating potential compared to the single epitopes alone.

[0224] The fusion protein can be efficiently encapsulated in a nanoparticle, as shown in FIG. 21. Batches were aliquoted into pre-weighed tubes, dried and weighed to determine the mg/tube of particles. mass in pre-weighed tubes. μg peptide/mg particle was determined using a CBQCA protein quantification assay.

### Example 5—Nanoparticles Encapsulating PLP139-Ova323 Fusion Peptides Mediate Tolerogenic Responses in EAE

[0225] Experiments were performed to determine the in vivo effects of nanoparticles encapsulating PLP139-OVA323 fusion protein in a model of EAE. EAE was induced in SLJ mice by immunization with the PLP₁₃₉₋₁₅₁ peptide epitope or PLP139-OVA323 fusion protein emulsified in adjuvant (N=5 per group). As shown in FIG. 22A, immunization with the PLP139-OVA323 fusion protein was sufficient to induce EAE. The magnitude of the resultant disease score was comparable to that induced by PLP₁₃₉₋₁₅₁ peptide immunization (FIG. 22A). FIG. 22→PLP-OVA linked EAE scores. PLP-OVA linked peptide induces disease and induces tolerance when encapsulated in PLGA nanoparticles. Importantly, administration of encapsulated PLP-OVA fusion protein (PLP-OVA) resulted in abrogation of EAE disease score (FIG. 22A). Further, this immune-modulation was antigen specific, as administration of encapsulated PLP-OVA fusion protein only reduced immune responses in SLJ mice immunized with the PLP, and did not affect immune responses induced by MOG peptide immunization (FIG. 22B). These results indicate that nanoparticles encapsulating linked-epitope fusion peptides induce tolerogenic immune responses in an antigen-specific manner.

### Example 6—Characterization of Nanoparticles Encapsulating Multi-Epitope Fusion Peptides

[0226] Fusion peptides of the PLP₁₃₉₋₁₅₁, PLP₁₇₈₋₁₉₁, MOG₉₂₋₁₀₆, and MBP₆₄₋₁₀₄ epitopes linked by a peptide linker comprising a cathepsin-specific cleavage site were generated (FIG. 23A, tolerogenic EAE-1 fusion peptide). Additionally, control fusion peptides comprising OVA₃₂₃₋₃₃₉, PLP₅₆₋₇₀, VP1₂₃₃₋₂₅₀, and VP2₇₀₈₆ epitopes linked by a peptide linker comprising a cathepsin-specific cleavage site were generated (FIG. 23B, EAE-1 control fusion peptide). Physical characteristics (Z-avg diameter, PDI, Peak diameter, and zeta potential) of nanoparticles encapsulating the tolerogenic fusion peptide were determined by DLS. Images of the particles were obtained using transmission electron microscopy (TEM) with particles dried on carbon-coated copper mesh grids. Both DLS and EM data indicate larger than normal size distribution (FIG. 24).

[0227] Encapsulation efficiency for tolerogenic fusion peptide or negative control fusion peptides are shown in FIG. 25. Batches were aliquoted into pre-weighed tubes, dried and weighed to determine the mg/tube of particles. mass in pre-weighed tubes. μg peptide/mg particle was determined using a CBQCA protein quantification assay.

[0228] Encapsulation of single and linked epitopes into PLGA nanoparticles is shown in FIG. 26. Single myelin specific T cells epitopes (PLP139, PLP178, MBP84, and MOG92) were encapsulated at lower efficiencies than linked EAE-1 peptides (PLP139:PLP178:MOG92:MBP), as determined by one way-ANOVA statistical test (p<0.0001). Similarly, individual control epitopes (Ova323, PLP56, VP1233 and VP270) were encapsulated at lower efficiencies than linked EAE-control epitopes (OVA323: PLP56: VP1: VP2).

### Example 7—Characterization of Nanoparticles Encapsulating Multi-Epitope Fusion Peptides

[0229] Experiments were performed to determine the effects of PLGA nanoparticles encapsulating the linked EAE-1 fusion peptide (PLP139:PLP178:MOG92:MBP) in an EAE model into nanoparticles results in significant reduction in EAE disease, compared to irrelevant control peptide (OVA) or a control linked epitope (OVA323:PLP56:VP1:VP2). Treatment of mice with encapsulated linked EAE-1 fusion peptide significantly reduced EAE disease score compared to treatment with the control fusion peptide or irrelevant control peptide (OVA) (FIG. 28). These data demonstrate that fusion peptides comprising multiple linked disease epitopes can induce tolerance in models of autoimmunity and indicate their therapeutic potential. FIG. 29 demonstrates that FALK peptides can also induce EAE, indicating that epitopes found in this protein may be incorporated into tolerogenic EAE fusion proteins as well.

### Example 8—Use of Encapsulated Linked Epitope Fusion Proteins in Treatment of Cancer

[0230] Fusion peptides comprising linked epitopes of neoantigens or tumor antigens are also used in the treatment of cancer. Such epitopes are combined with immune modulators, such as PD1, or Toll-like receptor agonists to increase therapeutic efficacy (See, FIG. 29). Data will show that encapsulated cancer antigens, such as Ny-Esol, delivered with an immune modulator such as anti-PD1 will result in T cell proliferation (See exemplary results in FIG. 31A), IFNγ production (See exemplary results in FIG. 31B), and IFNα production (See exemplary results in FIG. 31C). These results will show that encapsulated cancer antigen mediate immunogenic responses, resulting in pro-inflammatory cytokine production.

[0231] Further, treatment with encapsulated Ny-Esol will result in increased survival of mice in a murine model of melanoma. 0.01 mg/Kg infusions of encapsulated NY-ESO-1 (TIMP-NY-ESO-1) are given twice monthly (7 days apart) 6 months. Inhibition of PD1/PD-L 1 is achieved with Pembrolizumab or Nivolumab or Atezolizumab. TIMP-NY-ESO-1 treatment alone is sufficient to increase survival time and the effect is enhanced when was combined with anti-PD1 treatment (See exemplary results in FIG. 32).

[0232] Fusion peptides comprising linked cancer epitopes (NY-ESO-1, Mage-A3, TPTE, Tyrosinase, HPU16) have been previously described (See Kranz et al., Nature, V. 534, pp 396-401, 2016; U.S. Patent Pub. No. 2011-0070252). Fusion proteins comprising 4 cancer epitopes (NY-ESO-1, Mage-A3, TPTE, Tyrosinase) are generated to form an NMTT fusion protein. Various concentrations of encapsulated NMTT (TIMP-NMTT) are incubated with peripheral blood monocytes (PBMCs) from healthy subjects with or without anti-PD1/PDL1 treatment Cultures are incubated for 3-5 days and T cell proliferation is determined using cell-tire glow or incorporation of tritiated thymidine. IFNγ concentrations are determined using an ELISA. Incubation of PBMCs with TIMP-NMTT in combination with anti-PD1/PDL1 will result in increased T cell proliferation compared to controls (Exemplary results shown in FIG. 33A). Further, TIMP-NMTT in combination with anti-PD1/PDL1 will result in IFNγ production from PBMCs, whereas TIMP-NY-ESO-1 alone will have a negligible impact. These results will show that encapsulated fusion protein of cancer epitopes mediate immunogenic responses that are beneficial in the context of cancer treatment.

[0233] To determine the clinical effects of TIMP-NMTT, tumor antigen encoding TIMP-NMTT are prepared from GMP-manufactured components in a dedicated pharmacy under GMP. Patients are injected i.v. with weekly escalating doses of TIMP-NMTT encoding antigens NY-ESO-149, tyrosinase 50, MAGE-A351 and TPTE52 (1.9, 3.6 or 7.2 μg TIMP-NMTT of each antigen). Blood samples are obtained for cytokine measurements prior to vaccination, 2, 6, and 24 hours after vaccination on day 1, and on days 8 and 15 after vaccination for ELISPOT and MHC class I dextramer staining analyses. Blood samples for T-cell monitoring are obtained before vaccination on the respective vaccination day. Clinically administered TIMP-NMTT vaccines will dose-dependently induce systemic INFα and de novo T cell response.

### Example 9—Additional Uses of Encapsulated Linked Epitope Fusion Proteins

[0234] Additional fusion proteins comprising linked epitopes may be generated. For example, fusion proteins comprising epitopes derived from multiple disease types may be generated and used in the treatment of more than one disease. Alternatively, fusion proteins comprising disease-related epitopes may be generated that further comprise a TLR agonist. Inclusion of such an agonist will increase the immunogenicity of the protein and increase the therapeutic efficacy. Further fusion proteins may be generated with epitopes derived from infectious viruses, bacteria, or fungi. Addition of a TLR agonist to such constructs may also increase the therapeutic efficacy.

1. A biodegradable particle comprising one or more fusion proteins encapsulated therein;
wherein each one of said one or more fusion proteins comprises two or more antigenic epitopes;
wherein said two or more antigenic epitopes are separated by a linker; wherein the linker is cleavable by an intracellular protease;
and
wherein said biodegradable particle has a negative zeta potential between about −100 mV to about 0 mV.

2-6. (canceled)

7. The biodegradable particle of claim 1, wherein said biodegradable particle has a zeta potential of between about −80 mV and about −30 mV.

8-9. (canceled)

10. The biodegradable particle of claim 1, wherein said biodegradable particle has a diameter of between about 0.1 μm to about 10 μm.

11-15. (canceled)

16. The biodegradable particle of claim 1, wherein the amino acid sequence of the linker is susceptible to site-specific cleavage by proteases.

17-26. (canceled)

27. The biodegradable particle of claim 1, wherein the one or more antigenic epitopes comprise autoimmune antigens, antigens expressed on a tissue to be transplanted into a subject, antigens derived from an enzyme for enzyme replacement therapy, or antigens derived from an allergen or combinations thereof.

28-54. (canceled)

55. A pharmaceutical composition comprising a biodegradable particle of claim 1.

56-57. (canceled)

58. A method of inducing antigen-specific tolerance in a subject comprising administering an effective amount of the biodegradable particle of claim 1.

59. A method of inducing antigen-specific tolerance in a subject comprising administering to the subject an effective amount of a biodegradable particle comprising one or more fusion proteins encapsulated therein;
wherein each one of said one or more fusion proteins comprises two or more antigenic epitopes;
wherein said two or more antigenic epitopes are separated by a linker;
and,
wherein said biodegradable particle has a negative zeta potential between about −100 mV and about 0 mV.

60-63. (canceled)

64. The method of claim 59, wherein the effective amount of the biodegradable particle is administered to the subject to treat or prevent a disease or condition.

65. The method of claim 64, wherein the disease or condition is selected from the group consisting of an autoimmune disease, a lysosomal storage disease, an enzyme deficiency, inflammatory disease, an allergy, transplantation rejection, and a hyperimmune response.

66-81. (canceled)

82. A method of decreasing inhibitory neutrophil accumulation in a subject comprising administering to the subject an effective amount of a biodegradable particle comprising one or more fusion proteins encapsulated therein;
wherein each one of said one or more fusion proteins comprises two or more antigenic epitopes;
wherein said two or more antigenic epitopes are separated by a linker;
and,
wherein said biodegradable particle has a negative zeta potential between about −100 mV and about 0 mV.

83. The method of claim 82, wherein the subject has cancer.

84-110. (canceled)

111. A method of treating multiple sclerosis in a subject comprising administering to the subject an effective amount of a biodegradable particle comprising one or more fusion proteins encapsulated therein;
wherein each one of said one or more fusion proteins comprises two or more antigenic epitopes selected from the group consisting of MOG₁₋₂₀, MBP₁₃₋₃₂, MOG₃₅₋₅₅, MBP₁₄₆₋₁₇₀, PLP₁₃₉₋₁₅₄, MBP₁₁₁₋₁₂₉, and MBP₈₃₋₉₉;
wherein said two or more antigenic epitopes are separated by a linker;
wherein said biodegradable particle has a diameter of about 200 nm to 1000 nm and;
wherein said biodegradable particle has a negative zeta potential of less than −30 mV.

112-115. (canceled)

116. A method of treating primary biliary cirrhosis in a subject comprising administering to the subject an effective amount of a biodegradable particle comprising one or more fusion proteins encapsulated therein;
wherein each one of said one or more fusion proteins comprises two or more antigenic epitopes from pyruvate dehydrogenase dihydrolipoamide acetyltransferase (PCD-E2);
wherein said two or more antigenic epitopes are separated by a linker; and;
wherein said biodegradable particle has a negative zeta potential between about −100 mV and about 0 mV.

The application's sequence listing, which the Patent Office published only in electronic form, follows.

SEQUENCE LISTING (5150 sequences)

SEQ ID NO: 1 - protein, 21 aa, Mus musculus
MEVGWYRSPFSRVVHLYRNGK

SEQ ID NO: 2 - protein, 9 aa, Homo sapiens
ASFDKAKLK

SEQ ID NO: 3 - protein, 14 aa, Oryctolagus cuniculus
ASQKRPSQRHGSKY

SEQ ID NO: 4 - protein, 20 aa, Homo sapiens
ASQKRPSQRHGSKYLATAST

SEQ ID NO: 5 - protein, 20 aa, Homo sapiens
ATGLCFFGVALFCGCGHEAL

SEQ ID NO: 6 - protein, 20 aa, Homo sapiens
AVPVYIYFNTWTTCQSIAFP

SEQ ID NO: 7 - protein, 9 aa, Human alphaherpesvirus sp.
CLGGLLTMV

SEQ ID NO: 8 - protein, 9 aa, Human alphaherpesvirus sp.
CRVLCCYVL

SEQ ID NO: 9 - protein, 9 aa, Homo sapiens
DAKIRIFDL

SEQ ID NO: 10 - protein, 18 aa, Homo sapiens
DTPYLDITYHFVMQRLPL

SEQ ID NO: 11 - protein, 15 aa, unidentified
  REGION 1..15: note = epitope involved in multiple sclerosis
ENPVVAFFKNIVTPR

SEQ ID NO: 12 - protein, 15 aa, unidentified
  REGION 1..15: note = epitope involved in multiple sclerosis
ENPVVDFFKNIVTPR

SEQ ID NO: 13 - protein, 15 aa, unidentified
  REGION 1..15: note = epitope involved in multiple sclerosis
ENPVVHFFANIVTPR

SEQ ID NO: 14 - protein, 17 aa, unidentified
  REGION 1..17: note = epitope involved in multiple sclerosis
ENPVVHFFANIVTPRTP

SEQ ID NO: 15 - protein, 15 aa, Homo sapiens
ENPVVHFFKNIVTPR

SEQ ID NO: 16 - protein, 17 aa, Homo sapiens
ENPVVHFFKNIVTPRTP

SEQ ID NO: 17 - protein, 20 aa, Homo sapiens
FGDYKTTICGKGLSATVTGG

SEQ ID NO: 18 - protein, 9 aa, Homo sapiens
FLYGALLLA

SEQ ID NO: 19 - protein, 21 aa, Homo sapiens
FYYTTGAVRQIFGDYKTTICG

SEQ ID NO: 20 - protein, 24 aa, Human alphaherpesvirus sp.
GGDNHGRGRGRGRGRGGGRPGAPG

SEQ ID NO: 21 - protein, 9 aa, Human alphaherpesvirus sp.
GLCTLVAML

SEQ ID NO: 22 - protein, 13 aa, Mus musculus
HCLGKWLGHPDKF

SEQ ID NO: 23 - protein, 18 aa, Mus musculus
IFKLGGRDSRSGSPMARR

SEQ ID NO: 24 - protein, 15 aa, Homo sapiens
ITREEKPAVTAAPKK

SEQ ID NO: 25 - protein, 13 aa, Homo sapiens
IVTPRTPPPSQGK

SEQ ID NO: 26 - protein, 20 aa, Homo sapiens
KGLSATVTGGQKGRGYRGQH

SEQ ID NO: 27 - protein, 14 aa, Homo sapiens
KIFKLGGRDSRSGS

SEQ ID NO: 28 - protein, 20 aa, Homo sapiens
LFCGCGHEALTGTEKLIETY

SEQ ID NO: 29 - protein, 10 aa, Human alphaherpesvirus sp.
LLDFVRFMGV

SEQ ID NO: 30 - protein, 9 aa, Human alphaherpesvirus sp.
LLWTLVVLL

SEQ ID NO: 31 - protein, 20 aa, Homo sapiens
LPRHRDTGILDSIGRFFGGD

SEQ ID NO: 32 - protein, 20 aa, Homo sapiens
LVGAPFASLVATGLCFFGVA

SEQ ID NO: 33 - protein, 20 aa, Homo sapiens
LYGALLLAEGFYTTGAVRQI

SEQ ID NO: 34 - protein, 19 aa, Homo sapiens
MAATYNFAVLKLMGRFTKF

SEQ ID NO: 35 - protein, 13 aa, Human alphaherpesvirus sp.
MDRPRTPPPSYSE

SEQ ID NO: 36 - protein, 9 aa, Human alphaherpesvirus sp.
NLVPMVATV

SEQ ID NO: 37 - protein, 20 aa, Mus musculus
NPVVHFFKNIVTPRTPPPSQ

SEQ ID NO: 38 - protein, 14 aa, Mus musculus
NTWTTCQSIAFPSK

SEQ ID NO: 39 - protein, 20 aa, Homo sapiens
QKGRGSRGQHQAHSLERVCH

SEQ ID NO: 40 - protein, 8 aa, Human alphaherpesvirus sp.
RAKFKQLL

SEQ ID NO: 41 - protein, 9 aa, Human alphaherpesvirus sp.
RPPIFIRRL

SEQ ID NO: 42 - protein, 20 aa, Homo sapiens
SKTSASIGSLCADARMYGVL

SEQ ID NO: 43 - protein, 9 aa, Homo sapiens
SLSRFSWGA

SEQ ID NO: 44 - protein, 9 aa, Human alphaherpesvirus sp.
SVRDRLARL

SEQ ID NO: 45 - protein, 12 aa, unidentified
  REGION 1..12: note = epitope involved in multiple sclerosis
SVSVGMKPSPRP

SEQ ID NO: 46 - protein, 15 aa, Human alphaherpesvirus sp.
TGGVYHFVKKHVHES

SEQ ID NO: 47 - protein, 20 aa, Homo sapiens
TGTEKLIETYFSKNYQDYEY

SEQ ID NO: 48 - protein, 10 aa, Human alphaherpesvirus sp.
TPRVTGGGAM

SEQ ID NO: 49 - protein, 20 aa, Homo sapiens
VDAQGTLSKIFKLGGRDSRS

SEQ ID NO: 50 - protein, 13 aa, Cavia porcellus
VHFFKNIVTPRTP

SEQ ID NO: 51 - protein, 9 aa, Homo sapiens
VMAPRTLVL

SEQ ID NO: 52 - protein, 20 aa, Mus musculus
VTPRTPPPSQGKGRGLSLSR

SEQ ID NO: 53 - protein, 9 aa, Homo sapiens
VVHFFKNIV

SEQ ID NO: 54 - protein, 20 aa, Homo sapiens
WTTCQSIAFPSKTSASIGSL

SEQ ID NO: 55 - protein, 23 aa, Human alphaherpesvirus sp.
IQAIVSSPCHNSLILPPFSLSPV

SEQ ID NO: 56 - protein, 24 aa, Human alphaherpesvirus sp.
LPPTAPPLLPHSNLDHILEPSIPW

SEQ ID NO: 57 - protein, 20 aa, Human alphaherpesvirus sp.
PPPYVEPTAPQVLPVMHPHG

SEQ ID NO: 58 - protein, 23 aa, Human alphaherpesvirus sp.
QGGLCKALQEQCRFPNITNSHVP

SEQ ID NO: 59 - protein, 20 aa, Human alphaherpesvirus sp.
RASLSTWHVLYSPNVSVPSS

SEQ ID NO: 60 - protein, 10 aa, Homo sapiens
FFKNIVTPRT

SEQ ID NO: 61 - protein, 9 aa, Homo sapiens
FKNIVTPRT

SEQ ID NO: 62 - protein, 11 aa, Cavia porcellus
HFFKNIVTPRT

SEQ ID NO: 63 - protein, 15 aa, Homo sapiens
KGFKGVDAQGTLSKI

SEQ ID NO: 64 - protein, 13 aa, unidentified
  REGION 1..13: note = epitope involved in multiple sclerosis
VHFFKNIVTARTP

SEQ ID NO: 65 - protein, 13 aa, Homo sapiens
VVHFFKNIVTPRT

SEQ ID NO: 66 - protein, 9 aa, Human alphaherpesvirus sp.
SQAPLPCVL

SEQ ID NO: 67 - protein, 12 aa, unidentified
  REGION 1..12: note = epitope involved in multiple sclerosis
HTQPYAYEARDH

SEQ ID NO: 68 - protein, 15 aa, Bos taurus
FKADEKKFWGKYLYE

SEQ ID NO: 69 - protein, 16 aa, Homo sapiens
HCLGKWLGHPDKFVGI

SEQ ID NO: 70 - protein, 14 aa, Mus musculus
KTTICGKGLSATVT

SEQ ID NO: 71 - protein, 17 aa, Homo sapiens
VDDTQFVRFDSDAASPR

SEQ ID NO: 72 - protein, 22 aa, Mus musculus
EKLIETYFSKNYQDYEYLINVI

SEQ ID NO: 73 - protein, 9 aa, Mus musculus
ASQKRPSQR

SEQ ID NO: 74 - protein, 15 aa, Homo sapiens
DENPVVHFFKNIVTP

SEQ ID NO: 75 - protein, 19 aa, Homo sapiens
DENPVVHFFKNIVTPRTPP

SEQ ID NO: 76 - protein, 26 aa, Homo sapiens
FKGVDAQGTLSKIFKLGGRDSRSGSP

SEQ ID NO: 77 - protein, 18 aa, Homo sapiens
GTEKLIETYFSKNYQDYE

SEQ ID NO: 78 - protein, 16 aa, Homo sapiens
QSIAFPSKTSASIGSL

SEQ ID NO: 79 - protein, 25 aa, Homo sapiens
AQGTLSKIFKLGGRDSRSGSPMARR

SEQ ID NO: 80 - protein, 25 aa, Homo sapiens
ASDYKSAHKGLKGVDAQGTLSKIFK

SEQ ID NO: 81 - protein, 31 aa, Homo sapiens
EVGELSRGKLYSLGNGRWMLTLAKNMEVRAI

SEQ ID NO: 82 - protein, 18 aa, Homo sapiens
GFYTTGAVRQIFGDYKTT

SEQ ID NO: 83 - protein, 33 aa, Homo sapiens
GNGRWMLTLAKNMEVRAIFTGYYGKGKPVPTQG

SEQ ID NO: 84 - protein, 20 aa, Homo sapiens
GQFRVIGPRHPIRALVGDEV

SEQ ID NO: 85 - protein, 20 aa, Homo sapiens
HHPARTAHYGSLPQKSHGRT

SEQ ID NO: 86 - protein, 20 aa, Homo sapiens
KNIVTPRTPPPSQGKGRGLS

SEQ ID NO: 87 - protein, 20 aa, Homo sapiens
KYLATASTMDHARHGFLPRH

SEQ ID NO: 88 - protein, 19 aa, Homo sapiens
LSRFSWGAEGQRPGFGYGG

SEQ ID NO: 89 - protein, 21 aa, Homo sapiens
MEVGWYRPPFSRVVHLYRNGK

SEQ ID NO: 90 - protein, 20 aa, Homo sapiens
NTWTTCQSIAFPSKTSASIG

SEQ ID NO: 91 - protein, 20 aa, Homo sapiens
PIRALVGDEVELPCRISPGK

SEQ ID NO: 92 - protein, 12 aa, unidentified
  REGION 1..12: note = epitope involved in multiple sclerosis
QKSQRSQAENPV

SEQ ID NO: 93 - protein, 12 aa, Cavia porcellus
QKSQRSQDENPV

SEQ ID NO: 94 - protein, 20 aa, Homo sapiens
QRPGFGYGGRASDYKSAHKG

SEQ ID NO: 95 - protein, 20 aa, Homo sapiens
RHRDTGILDSIGRFFGGDRG

SEQ ID NO: 96 - protein, 20 aa, Homo sapiens
SKIFKLGGRDSRSGSPMARR

SEQ ID NO: 97 - protein, 21 aa, Homo sapiens
SKTSASIGSLCADARMYGVLP

SEQ ID NO: 98 - protein, 21 aa, Homo sapiens
TGTEKLIETYFSKNYQDYEYL

SEQ ID NO: 99 - protein, 13 aa, unidentified
  REGION 1..13: note = epitope involved in multiple sclerosis
VHFFRNIVTARTP

SEQ ID NO: 100 - protein, 13 aa, unidentified
  REGION 1..13: note = epitope involved in multiple sclerosis
VHFFRNIVTARTP

SEQ ID NO: 101 - protein, 20 aa, Homo sapiens
VVHFFKNIVTPRTPPPSQGK

SEQ ID NO: 102 - protein, 21 aa, Homo sapiens
ASQKRPSQRHGSKYLATASTM

SEQ ID NO: 103 - protein, 44 aa, Homo sapiens
ASQKRPSQRHGSKYLATASTMDHARHGFLPRHRDTGILDSIGRF

SEQ ID NO: 104 - protein, 21 aa, Homo sapiens
ASTMDHARHGFLPRHRDTGIL

SEQ ID NO: 105 - protein, 23 aa, Homo sapiens
AVRQIFGDYKTTICGKGLSATVT

SEQ ID NO: 106 - protein, 19 aa, Homo sapiens
ENPVVHFFKNIVTPRTPPP

SEQ ID NO: 107 - protein, 18 aa, Homo sapiens
GFYTTGAYRQIFGDYLTT

SEQ ID NO: 108 - protein, 20 aa, Homo sapiens
GRASDYKSAHKGFKGVDAQG

SEQ ID NO: 109 - protein, 25 aa, Homo sapiens
GVLPWNAFPGKVCGSNLLSICKTAE

SEQ ID NO: 110 - protein, 12 aa, unidentified
  REGION 1..12: note = epitope involved in multiple sclerosis
HLILAPSIRHAP

SEQ ID NO: 111 - protein, 12 aa, unidentified
  REGION 1..12: note = epitope involved in multiple sclerosis
HLVMAPSVARGL

SEQ ID NO: 112 - protein, 12 aa, unidentified
  REGION 1..12: note = epitope involved in multiple sclerosis
HVQLAPPIALRH

SEQ ID NO: 113 - protein, 12 aa, unidentified
  REGION 1..12: note = epitope involved in multiple sclerosis
HVVLAPNVQSPL

SEQ ID NO: 114 - protein, 24 aa, Homo sapiens
HYGSLPQKSHGRTQDENPVVHFFK

SEQ ID NO: 115 - protein, 14 aa, Homo sapiens
KKQSKPVTTPEEIA

SEQ ID NO: 116 - protein, 33 aa, Homo sapiens
KLIETYFSKNYQDYEYLINVIHAFQYVIYGTAS

SEQ ID NO: 117 - protein, 30 aa, Homo sapiens
LATASTMDHARHGFLPRHRDTGILDSIGRF

SEQ ID NO: 118 - protein, 23 aa, Homo sapiens
LTFMIAATYNFAVLKLMGRGTKF

SEQ ID NO: 119 - protein, 20 aa, Bos taurus
MIAATYNFAVLKLMGRGTKF

SEQ ID NO: 120 - protein, 21 aa, Homo sapiens
RHGSKYLATASTMDHARHGFL

SEQ ID NO: 121 - protein, 22 aa, Homo sapiens
SIAFPSKTSASIGSLCADARMY

SEQ ID NO: 122 - protein, 34 aa, Homo sapiens
TGGQKGRGSRGQHQAHSLERVCHCLGKWLGHPDK

SEQ ID NO: 123 - protein, 20 aa, Bos taurus
TTICGKGLSATVTGGQKGRG

SEQ ID NO: 124 - protein, 14 aa, Homo sapiens
VVTEIPKEEKDPGM

SEQ ID NO: 125 - protein, 12 aa, unidentified
  REGION 1..12: note = epitope involved in multiple sclerosis
WHAPQTPYWASM

SEQ ID NO: 126 - protein, 12 aa, unidentified
  REGION 1..12: note = epitope involved in multiple sclerosis
WHIPPNIGRTFS

SEQ ID NO: 127 - protein, 12 aa, unidentified
  REGION 1..12: note = epitope involved in multiple sclerosis
WHQTYTSSLWES

SEQ ID NO: 128 - protein, 12 aa, unidentified
  REGION 1..12: note = epitope involved in multiple sclerosis
WHTQPAHVVTPM

SEQ ID NO: 129 - protein, 12 aa, unidentified
  REGION 1..12: note = epitope involved in multiple sclerosis
WHTSDPLPPAQP

SEQ ID NO: 130 - protein, 26 aa, Homo sapiens
ALVGDEVELPCRISPGKNATGMELGW

SEQ ID NO: 131 - protein, 7 aa, unidentified
  REGION 1..7: note = epitope involved in multiple sclerosis
ARWELNL

SEQ ID NO: 132 - protein, 22 aa, Homo sapiens
AVRQIFGDYKTTICGKGLSATV

SEQ ID NO: 133 - protein, 20 aa, Homo sapiens
DTGILDSIGRFFGGDRGAPK

SEQ ID NO: 134 - protein, 20 aa, Homo sapiens
EKDRFSVNLDVSHFSPEELK

SEQ ID NO: 135 - protein, 7 aa, unidentified
  REGION 1..7: note = epitope involved in multiple sclerosis
EPLYGPY

SEQ ID NO: 136 - protein, 20 aa, Homo sapiens
FDTGLSEMRLEKDRFSVNLD

SEQ ID NO: 137 - protein, 26 aa, Homo sapiens
GQFRVIGPRHPIRALVGDEVELPCRI

SEQ ID NO: 138 - protein, 20 aa, Homo sapiens
GSGKDSHHPARTAHYGSLPQ

SEQ ID NO: 139 - protein, 15 aa, Homo sapiens
GSLPQKSHGRTQDEN

SEQ ID NO: 140 - protein, 20 aa, Homo sapiens
GVLTVNGPRKQVSGPERTIP

SEQ ID NO: 141 - protein, 23 aa, Homo sapiens
GWYRPPFSRVVHLYRNGKDQDGD

SEQ ID NO: 142 - protein, 20 aa, Homo sapiens
HGFISREFHRKYRIPADVDP

SEQ ID NO: 143 - protein, 20 aa, Homo sapiens
HGKHEERQDEHGFISREFHR

SEQ ID NO: 144 - protein, 20 aa, Homo sapiens
HLLESDLFPTSTSLSPFYLR

SEQ ID NO: 145 - protein, 25 aa, Homo sapiens
IGEGKVTLRIRNVRFSDEGGFTCFF

SEQ ID NO: 146 - protein, 20 aa, Homo sapiens
KYRIPADVDPLTITSSLSSD

SEQ ID NO: 147 - protein, 7 aa, unidentified
  REGION 1..7: note = epitope involved in multiple sclerosis
LATPNPS

SEQ ID NO: 148 - protein, 20 aa, Homo sapiens
LTITSSLSSDGVLTVNGPRK

SEQ ID NO: 149 - protein, 24 aa, Homo sapiens
LYRNGKDQDGDAPEYRGRTELLKD

SEQ ID NO: 150 - protein, 20 aa, Homo sapiens
MDIAIHHPWIRRPFFPFHSP

SEQ ID NO: 151 - protein, 7 aa, unidentified
  REGION 1..7: note = epitope involved in multiple sclerosis
PEFAPWA

SEQ ID NO: 152 - protein, 7 aa, unidentified
  REGION 1..7: note = epitope involved in multiple sclerosis
PEQPPIH

SEQ ID NO: 153 - protein, 25 aa, Homo sapiens
PEYRGRTELLKDAIGEGKVTLRIRN

SEQ ID NO: 154 - protein, 20 aa, Homo sapiens
PPSFLRAPSWFDTGLSEMRL

SEQ ID NO: 155 - protein, 20 aa, Homo sapiens
PVVHFFKNIVTPRTPPPSQG

SEQ ID NO: 156 - protein, 20 aa, Homo sapiens
QGKGRGLSLSRFSWGAEGQR

SEQ ID NO: 157 - protein, 20 aa, Homo sapiens
QVSGPERTIPITREEKPAVT

SEQ ID NO: 158 - protein, 25 aa, Homo sapiens
RDHSYQEEAAMELKVEDPFYWVSPG

SEQ ID NO: 159 - protein, 25 aa, Homo sapiens
RFSDEGGFTCFFRDHSYQEEAAMEL

SEQ ID NO: 160 - protein, 20 aa, Homo sapiens
RRPFFPFHSPSRLFDQFFGE

SEQ ID NO: 161 - protein, 24 aa, Homo sapiens [sequence omitted]

SEQ ID NO: 162 - protein, 20 aa, Homo sapiens
SRLFDQFFGEHLLESDLFPT

SEQ ID NO: 163 - protein, 20 aa, Homo sapiens
STSLSPFYLRPPSFLRAPSW

SEQ ID NO: 164 - protein, 7 aa, unidentified
  REGION 1..7: note = epitope involved in multiple sclerosis
SWYARHT

SEQ ID NO: 165 - protein, 7 aa, unidentified
  REGION 1..7: note = epitope involved in multiple sclerosis
SWYARHY

SEQ ID NO: 166 - protein, 7 aa, unidentified
  REGION 1..7: note = epitope involved in multiple sclerosis
TIKNTFF

SEQ ID NO: 167 - protein, 14 aa, Homo sapiens
TLSKIFKLGGRDSR

SEQ ID NO: 168 - protein, 7 aa, unidentified
  REGION 1..7: note = epitope involved in multiple sclerosis
TPTFMYF

SEQ ID NO: 169 - protein, 7 aa, unidentified
  REGION 1..7: note = epitope involved in multiple sclerosis
TSPSVAY

SEQ ID NO: 170 - protein, 7 aa, unidentified
  REGION 1..7: note = epitope involved in multiple sclerosis
TTPLTNL

SEQ ID NO: 171 - protein, 13 aa, Homo sapiens
VDAQGTLSKIFKL

SEQ ID NO: 172 - protein, 7 aa, unidentified
  REGION 1..7: note = epitope involved in multiple sclerosis
VDHQHPS

SEQ ID NO: 173 - protein, 20 aa, Homo sapiens
VKVLGDVIEVHGKHEERQDE

SEQ ID NO: 174 - protein, 20 aa, Homo sapiens
VSHFSPEELKVKVLGDVIEV

SEQ ID NO: 175 - protein, 7 aa, unidentified
  REGION 1..7: note = epitope involved in multiple sclerosis
YAQPSER

SEQ ID NO: 176 - protein, 15 aa, Homo sapiens
AAAQMPAYQELVEEA

SEQ ID NO: 177 - protein, 26 aa, Cavia porcellus
AARTTHYGSLPQKSQRSQDENPVVHF

SEQ ID NO: 178 - protein, 15 aa, Homo sapiens
AGVTLISPFVGRILD

SEQ ID NO: 179 - protein, 19 aa, Homo sapiens
ARRKVAMATTYYFDYWGQG

SEQ ID NO: 180 - protein, 20 aa, Homo sapiens
ARTAHYGSLPQKSHGRTQDE

SEQ ID NO: 181 - protein, 15 aa, Human alphaherpesvirus sp.
ARVAEHPDARLAWAR

SEQ ID NO: 182 - protein, 15 aa, Homo sapiens
ASDLEKIHLDEKSFR

SEQ ID NO: 183 - protein, 20 aa, Homo sapiens
ASGGTFSSFAINWVRQAPGQ

SEQ ID NO: 184 - protein, 19 aa, Homo sapiens
CFYQKKEEDWICCACQKTR

SEQ ID NO: 185 - protein, 15 aa, Homo sapiens
DATTNPSLILAAAQM

SEQ ID NO: 186 - protein, 15 aa, Homo sapiens
DFLTISPKLLGELLQ

SEQ ID NO: 187 - protein, 20 aa, Homo sapiens
DHARHGFLPRHRDTGILDSI

SEQ ID NO: 188 - protein, 15 aa, Homo sapiens
DPGVKSVTKIYNYYK

SEQ ID NO: 189 - protein, 15 aa, Homo sapiens
DQMAVEKLSDGIRKF

SEQ ID NO: 190 - protein, 23 aa, Homo sapiens
DRFSGSKSVSTASLTISGLQAED

SEQ ID NO: 191 - protein, 19 aa, Homo sapiens
DRKYSICKSGCFYQKKEED

SEQ ID NO: 192 - protein, 17 aa, Homo sapiens
DSYTLTEELAYAEIRVK

SEQ ID NO: 193 - protein, 20 aa, Homo sapiens
DYKSAHKGFKGVDAQGTLSK

SEQ ID NO: 194 - protein, 15 aa, Homo sapiens
EAGISKDRILIKLSS

SEQ ID NO: 195 - protein, 21 aa, Homo sapiens
EDTAVYYCARNSGYSISRDVY

SEQ ID NO: 196 - protein, 15 aa, Homo sapiens
EKSFRWLHNEDQMAV

SEQ ID NO: 197 - protein, 17 aa, Homo sapiens
ENLHRTFDPHFLRVPCW

SEQ ID NO: 198 - protein, 20 aa, Homo sapiens
ENPVVHFFKNIVTPRTPPPS

SEQ ID NO: 199 - protein, 22 aa, Homo sapiens
EWMGGIIPIFGAADYAQKFQGR

SEQ ID NO: 200 - protein, 15 aa, Homo sapiens
FDPHFLRVPCWKITL

SEQ ID NO: 201 - protein, 15 aa, Homo sapiens
FGAEILKKIPGRVST

SEQ ID NO: 202 - protein, 15 aa, Homo sapiens
FHAIDEYKPQDATTN

SEQ ID NO: 203 - protein, 15 aa, Human alphaherpesvirus sp.
FIVLSIAYPTLSEIK

SEQ ID NO: 204 - protein, 20 aa, Homo sapiens
FKGVDAQGTLSKIFKLGGRD

SEQ ID NO: 205 - protein, 15 aa, Homo sapiens
FTTVVADTGDFHAID

SEQ ID NO: 206 - protein, 15 aa, Homo sapiens
GELLQDNAKLVPVLS

SEQ ID NO: 207 - protein, 21 aa, Homo sapiens
GFTFSDYYMNWIRQAPGKGLE

SEQ ID NO: 208 - protein, 21 aa, Homo sapiens
GHWGAWMPSSISAFEGTCVSI

SEQ ID NO: 209 - protein, 15 aa, Homo sapiens
GIHCNMTLLFSFAQA

SEQ ID NO: 210 - protein, 15 aa, Human alphaherpesvirus sp.
GIKQLQARVLAVERY

SEQ ID NO: 211 - protein, 15 aa, Homo sapiens
GIRKFAADAVKLERM

SEQ ID NO: 212 - protein, 22 aa, Homo sapiens
GNAKNSLYLQMHSLRAEDTAVY

SEQ ID NO: 213 - protein, 20 aa, Homo sapiens
GRFFGGDRGAPKRGSGKDSH

SEQ ID NO: 214 - protein, 15 aa, Homo sapiens
GRILDWHVANTDKKS

SEQ ID NO: 215 - protein, 15 aa, Homo sapiens
GRVSTEVDARLSFDK

SEQ ID NO: 216 - protein, 20 aa, Homo sapiens
GVDAQGTLSKIFKLGGRDSR

SEQ ID NO: 217 - protein, 19 aa, Homo sapiens
HFSIHCCPPFTFLNSKKEI

SEQ ID NO: 218 - protein, 20 aa, Homo sapiens
HRDTGILDSIGRFFGGDRGA

SEQ ID NO: 219 - protein, 15 aa, Homo sapiens
IKLSSTWEGIQAGKE

SEQ ID NO: 220 - protein, 20 aa, Homo sapiens
IVTPRTPPPSQGKGRGLSLS

SEQ ID NO: 221 - protein, 18 aa, Homo sapiens
KIFKLGGRDSRSGSPMAR

SEQ ID NO: 222 - protein, 16 aa, Homo sapiens
KLERMLTERMFNAENG

SEQ ID NO: 223 - protein, 15 aa, Homo sapiens
KLGGSQEDQIKNAID

SEQ ID NO: 224 - protein, 15 aa, Homo sapiens
KNAIDKLFVLFGAEI

SEQ ID NO: 225 - protein, 15 aa, Homo sapiens
LSFDKDAMVARARRL

SEQ ID NO: 226 - protein, 20 aa, Homo sapiens
LSRFSWGAEGQRPGFGYGGR

SEQ ID NO: 227 - protein, 20 aa, Homo sapiens
LSYSHSDYDLGKRPTKDSYT

SEQ ID NO: 228 - protein, 15 aa, Homo sapiens
LVEEAIAYGRKLGGS

SEQ ID NO: 229 - protein, 26 aa, Homo sapiens
LVGDEVELPCRISPGKNATGMEVGWY

SEQ ID NO: 230 - protein, 25 aa, Homo sapiens
LYRNGKDQDGDQAPEYRGRTELLKD

SEQ ID NO: 231 - protein, 20 aa, Homo sapiens
MASQKRPSQRHGSKYLATAS

SEQ ID NO: 232 - protein, 15 aa, Homo sapiens
MESALDQLKQFTTVV

SEQ ID NO: 233 - protein, 19 aa, Homo sapiens
MSQKPAKEGPRLSKNQKYS

SEQ ID NO: 234 - protein, 15 aa, Homo sapiens
MSSSPVKRQRMESAL

SEQ ID NO: 235 - protein, 15 aa, Human alphaherpesvirus sp.
NPVMERFAAHAGDLV

SEQ ID NO: 236 - protein, 20 aa, Homo sapiens
NSGYSISRDVYWGQGTLVTV

SEQ ID NO: 237 - protein, 23 aa, Homo sapiens
PCRFDFPDELRPAVVHGVHYFNS

SEQ ID NO: 238 - protein, 20 aa, Homo sapiens
PGFGYGGRASDYKSAHKGFK

SEQ ID NO: 239 - protein, 23 aa, Homo sapiens
PPFTFLNSKKEIVDRKYSICKSG

SEQ ID NO: 240 - protein, 20 aa, Homo sapiens
PQKSHGRTQDENPVVHFFKN

SEQ ID NO: 241 - protein, 25 aa, Homo sapiens
PRPEVRPPPAKQRPPQKSKQQPRSS

SEQ ID NO: 242 - protein, 15 aa, Homo sapiens
QAGKELEEQHGIHCN

SEQ ID NO: 243 - protein, 11 aa, Homo sapiens
QFQLVESGGGL

SEQ ID NO: 244 - protein, 22 aa, Homo sapiens
QKYSEHFSIHCCPPFTFLNSKK

SEQ ID NO: 245 - protein, 24 aa, Homo sapiens
QPRSSPLRGPGASRGGSPVKASRF

SEQ ID NO: 246 - protein, 24 aa, Homo sapiens
QQHPGKAPKVMIYDVTKRPSGVPD

SEQ ID NO: 247 - protein, 23 aa, Homo sapiens
QRPPQKSKQQPRSSPLRGPGASR

SEQ ID NO: 248 - protein, 12 aa, Homo sapiens
QSVLTQPRSVSG

SEQ ID NO: 249 - protein, 13 aa, Homo sapiens
QSVLTQSPSASAS

SEQ ID NO: 250 - protein, 20 aa, Homo sapiens
QTWGTGIETVFGGGTKVTVL

SEQ ID NO: 251 - protein, 21 aa, Homo sapiens
RAEDTAVYYCARRKVAMATTY

SEQ ID NO: 252 - protein, 15 aa, Homo sapiens
RARRLIELYKEAGIS

SEQ ID NO: 253 - protein, 20 aa, Homo sapiens
RFSWGAEGQRPGFGYGGRAS

SEQ ID NO: 254 - protein, 20 aa, Homo sapiens
RGSGKDSHHPARTAHYGSLP

SEQ ID NO: 255 - protein, 19 aa, Homo sapiens
RLSKNQKYSEHFSIHCCPP

SEQ ID NO: 256 - protein, 19 aa, Homo sapiens
RPGFGYGGRASDYKSAHKG

SEQ ID NO: 257 - protein, 15 aa, Homo sapiens
SFAQAVACAEAGVTL

SEQ ID NO: 258 - protein, 24 aa, Homo sapiens
SGCFYQKKEEDWICCACQKTRTSR

SEQ ID NO: 259 - protein, 20 aa, Homo sapiens
SKYLATASTMDHARHGFLPR

SEQ ID NO: 260 - protein, 20 aa, Homo sapiens
SQRHGSKYLATASTMDHARH

SEQ ID NO: 261 - protein, 20 aa, Homo sapiens
SVKGRFTISRGNAKNSLYLQ

SEQ ID NO: 262 - protein, 19 aa, Homo sapiens
SYAGGSACVFGTGTKLTVL

SEQ ID NO: 263 - protein, 15 aa, Homo sapiens
TDKKSYEPLEDPGVK

SEQ ID NO: 264 - protein, 19 aa, Homo sapiens
TFLNSKKEIVDRKYSICKS

SEQ ID NO: 265 - protein, 15 aa, Homo sapiens
TGEIKALAGCDFLTI

SEQ ID NO: 266 - protein, 15 aa, Homo sapiens
TIVMGASFRNTGEIK

SEQ ID NO: 267 - protein, 20 aa, Homo sapiens
VIVEMNSSVEAIEGSHVSLL

SEQ ID NO: 268 - protein, 15 aa, Human alphaherpesvirus sp.
VPVLAFDAARLRLLE

SEQ ID NO: 269 - protein, 15 aa, Homo sapiens
VPVLSAKAAQASDLE

SEQ ID NO: 270 - protein, 20 aa, unidentified
  REGION 1..20: note = epitope involved in multiple sclerosis
YDENPVVHFFKNIVTPRTPP

SEQ ID NO: 271 - protein, 15 aa, Homo sapiens
YNYYKKFSYKTIVMG

SEQ ID NO: 272 - protein, 15 aa, Homo sapiens
ARTAHYGSLPQKSHG

SEQ ID NO: 273 - protein, 20 aa, Cavia porcellus
ASQKRPSQRHGSKYLATAST

SEQ ID NO: 274 - protein, 38 aa, Homo sapiens
ASQKRPSQRHGSKYLATASTMDHARHGFLPRHRDTGIL

SEQ ID NO: 275 - protein, 17 aa, Human alphaherpesvirus sp.
DAYPCYFFKSACRPRAP

SEQ ID NO: 276 - protein, 17 aa, Homo sapiens
DENPVVHFFKNIVTPRT

SEQ ID NO: 277 - protein, 8 aa, unidentified
  REGION 1..8: note = epitope involved in multiple sclerosis
EAGAGGGA

SEQ ID NO: 278 - protein, 12 aa, Bos taurus
EDKGACLLPKIE

SEQ ID NO: 279 - protein, 15 aa, unidentified
  REGION 1..15: note = epitope involved in multiple sclerosis
ENPKVHFFKNIVTPR

SEQ ID NO: 280 - protein, 8 aa, unidentified
  REGION 1..8: note = epitope involved in multiple sclerosis
EPARSRSR

SEQ ID NO: 281 - protein, 15 aa, unidentified
  REGION 1..15: note = epitope involved in multiple sclerosis
EPMTPHQWITLYRSY

SEQ ID NO: 282 - protein, 15 aa, unidentified
  REGION 1..15: note = epitope involved in multiple sclerosis
FCPPILPYSAWCPVP

SEQ ID NO: 283 - protein, 20 aa, Mus musculus
GFGYGGRASDYKSAHKGFKG

SEQ ID NO: 284 - protein, 12 aa, Homo sapiens
GKWLGHPDKFVG

SEQ ID NO: 285 - protein, 19 aa, Homo sapiens
GSKYLATASTMDHARHGFL

SEQ ID NO: 286 - protein, 20 aa, Homo sapiens
GSKYLATASTMDHARHGFLP

SEQ ID NO: 287 - protein, 15 aa, Homo sapiens
HHPARTAHYGSLPQK

SEQ ID NO: 288 - protein, 22 aa, Homo sapiens
HHPARTAHYGSLPQKSHGRTQD

SEQ ID NO: 289 - protein, 15 aa, Human alphaherpesvirus sp.
IGGRVHFFKDISPIA

SEQ ID NO: 290 - protein, 11 aa, Homo sapiens
KLSDGIRKFAA

SEQ ID NO: 291 - protein, 16 aa, Homo sapiens
KNIVTPRTPPPSQGKG

SEQ ID NO: 292 - protein, 21 aa, Homo sapiens
KSHGRTQDENPVVHFFKNIVT

SEQ ID NO: 293 - protein, 21 aa, Homo sapiens
KSHGRTQDQDPVVHFFKNIVT

SEQ ID NO: 294 - protein, 9 aa, Homo sapiens
LLFSFAQAV

SEQ ID NO: 295 - protein, 20 aa, Cavia porcellus
MDHARHGFLPRHRDTGILDS

SEQ ID NO: 296 - protein, 15 aa, unidentified
  REGION 1..15: note = epitope involved in multiple sclerosis
MPVSRLCIELDWCPP

SEQ ID NO: 297 - protein, 20 aa, Homo sapiens
PSQGKGRGLSLSRFSWGAEG

SEQ ID NO: 298 - protein, 15 aa, unidentified
  REGION 1..15: note = epitope involved in multiple sclerosis
RGTQEWTELWVSFRA

SEQ ID NO: 299 - protein, 16 aa, Homo sapiens
SHHPARTAHYGSLPQK

SEQ ID NO: 300 - protein, 15 aa, unidentified
  REGION 1..15: note = epitope involved in multiple sclerosis
SRGSHEWAVLFRFYY

SEQ ID NO: 301 - protein, 15 aa, unidentified
  REGION 1..15: note = epitope involved in multiple sclerosis
SSAKSHCYAFCSGLP

SEQ ID NO: 302 - protein, 12 aa, Homo sapiens
TCFFRDHSYQEE

SEQ ID NO: 303 - protein, 10 aa, Homo sapiens
TQDENPVVHF

SEQ ID NO: 304 - protein, 18 aa, Homo sapiens
TQDQDPVVHFFKNIVTPR

SEQ ID NO: 305 - protein, 12 aa, Bos taurus
TSVFDKLKHLVD

SEQ ID NO: 306 - protein, 21 aa, Mus musculus
VHFFKNIVTPRTPPPSQGKGR

SEQ ID NO: 307 - protein, 10 aa, Homo sapiens
VVHFFKNIVT

SEQ ID NO: 308 - protein, 15 aa, Homo sapiens
YGSLPQKSHGRTQDQ

SEQ ID NO: 309 - protein, 17 aa, Homo sapiens
YKDSHHPARTAHYGSLP

SEQ ID NO: 310 - protein, 9 aa, Homo sapiens
DYKSAHKGF

SEQ ID NO: 311 - protein, 15 aa, Homo sapiens
GKDSHHPARTAHYGS

SEQ ID NO: 312 - protein, 9 aa, Homo sapiens
KYLATASTM

SEQ ID NO: 313 - protein, 21 aa, Homo sapiens
DENPVVHFFKNIVTPRTPPPS

SEQ ID NO: 314 - protein, 12 aa, Homo sapiens
FFKNIVTPRTPP

SEQ ID NO: 315 - protein, 21 aa, Homo sapiens
TGGQKGRGSRGQHQAHSLERV

SEQ ID NO: 316 - protein, 18 aa, Homo sapiens
YKTTICGKGLSATVTGGQ

SEQ ID NO: 317 - protein, 20 aa, Homo sapiens
GLSLSRFSWGAEGQRPGFGY

SEQ ID NO: 318 - protein, 19 aa, Homo sapiens
APKRGSGKDSHHAARTAHY

SEQ ID NO: 319 - protein, 23 aa, Homo sapiens
DAIGEGKVTLRIRNVRFSDEGGF

SEQ ID NO: 320 - protein, 21 aa, Homo sapiens
DSIGRFFGGDRGAPKRGSGKD

SEQ ID NO: 321 - protein, 20 aa, Homo sapiens
ELPCRISPGKNATGMEVGWY

SEQ ID NO: 322 - protein, 23 aa, Homo sapiens
EYRGRTELLKDAIGEGKVTLRIR

SEQ ID NO: 323 - protein, 20 aa, Homo sapiens
FSWGAEGQRPGFGYGGRASD

SEQ ID NO: 324 - protein, 22 aa, Homo sapiens
GGQKGRGSRGQHQAHSLERVCH

SEQ ID NO: 325 - protein, 15 aa, Human alphaherpesvirus sp.
GGRRLFFVKAHVRES

SEQ ID NO: 326 - protein, 20 aa, Homo sapiens
GKGRGLSLSRFSWGAEGQRP

SEQ ID NO: 327 - protein, 24 aa, Homo sapiens
GLSLSRFSWGAEGQRPGFGYGGRA

SEQ ID NO: 328 - protein, 23 aa, Homo sapiens
GMEVGWYRPPFSRVVHLYRNGKD

SEQ ID NO: 329 - protein, 22 aa, Homo sapiens
GQFRVIGPRHPIRALVGDEVEL

SEQ ID NO: 330 - protein, 15 aa, Homo sapiens
GTLSKIFKLGGRDSR

SEQ ID NO: 331 - protein, 26 aa, Homo sapiens
GVDAQGTLSKIFKLGGRDSRSGSPMA

SEQ ID NO: 332 - protein, 19 aa, Homo sapiens
HAARTAHYGSLPQKSQGHR

SEQ ID NO: 333 - protein, 17 aa, Homo sapiens
HCLGKWLGHPDKFVGIT

SEQ ID NO: 334 - protein, 15 aa, Homo sapiens
LGHPDKFVGITYALT

SEQ ID NO: 335 - protein, 20 aa, Homo sapiens
LGQGPEFLTYFQNEAQLEKS

SEQ ID NO: 336 - protein, 20 aa, Homo sapiens
LLAEGFYTTGAVRQIFGDYK

SEQ ID NO: 337 - protein, 19 aa, Homo sapiens
NPVVHFFKNIVTPRTPPPS

SEQ ID NO: 338 - protein, 20 aa, Homo sapiens
PQDENPVVHFFKNIVTPRTP

SEQ ID NO: 339 - protein, 20 aa, Homo sapiens
PRHRDTGILDSIGRFFGGDR

SEQ ID NO: 340 - protein, 19 aa, unidentified
  REGION 1..19: note = epitope involved in multiple sclerosis
QAHSLERVSHSLGKWLGHP

SEQ ID NO: 341 - protein, 20 aa, Homo sapiens
RDTGILDSIGRFFGGDRGAP

SEQ ID NO: 342 - protein, 20 aa, Homo sapiens
RFFGGDRGAPKRGSGKDSHH

SEQ ID NO: 343 - protein, 20 aa, Homo sapiens
RTAHYGSLPQKSHGRTQDEN

SEQ ID NO: 344 - protein, 20 aa, Homo sapiens
YKSAHKGFKGVDAQGTLSKI

SEQ ID NO: 345 - protein, 25 aa, Homo sapiens
AARTTHYGSLPQKSQRSQDQNPVHF

SEQ ID NO: 346 - protein, 25 aa, Bos taurus
AEYRGRVSLVEDHIAEGSVAVRIQE

SEQ ID NO: 347 - protein, 17 aa, unidentified
  REGION 1..17: note = epitope involved in multiple sclerosis
AKPVVHLFANIVTPRTP

SEQ ID NO: 348 - protein, 26 aa, Bos taurus
APFDVIGPQEPILAVVGEDAELPCRL

SEQ ID NO: 349 - protein, 11 aa, Homo sapiens
ASDYKSAHKGF

SEQ ID NO: 350 - protein, 19 aa, Homo sapiens
ASQKRPSQRHGKYLATAST

SEQ ID NO: 351 - protein, 20 aa, Mus musculus
ASQKRPSQRSKYLATASTMD

SEQ ID NO: 352 - protein, 26 aa, Bos taurus
AVVGEDAELPCRLSPNVSAKGMELRW

SEQ ID NO: 353 - protein, 11 aa, Homo sapiens
DENPVVHFFKN

SEQ ID NO: 354 - protein, 17 aa, Homo sapiens
ENPVVHEFKNIVTPRTP

SEQ ID NO: 355 - protein, 14 aa, Homo sapiens
ENPVVHFFKNIVTP

SEQ ID NO: 356 - protein, 15 aa, unidentified
  REGION 1..15: note = epitope involved in multiple sclerosis
ENPVVHFFLNIVTPR

SEQ ID NO: 357 - protein, 15 aa, unidentified
  REGION 1..15: note = epitope involved in multiple sclerosis
ENPVVHFFRNIVTPR

SEQ ID NO: 358 - protein, 19 aa, Homo sapiens
GLSLSRFSWGAQGQKPGFG

SEQ ID NO: 359 - protein, 23 aa, Homo sapiens
GTLSKIFKLGGRDSRSGSPMARR

SEQ ID NO: 360 - protein, 25 aa, Bos taurus
IAEGSVAVRIQEVKASDDGEYRCFF

SEQ ID NO: 361 - protein, 25 aa, Bos taurus
KASDDGEYRCFFRQDENYEEAIVHL

SEQ ID NO: 362 - protein, 22 aa, Homo sapiens
KSHGRTQDENPVVHFFKNIVTP

SEQ ID NO: 363 - protein, 17 aa, Homo sapiens
LATASTMDHARHGFLPR

SEQ ID NO: 364 - protein, 14 aa, Homo sapiens
NPVVHFFKNIVTPR

SEQ ID NO: 365 - protein, 19 aa, Homo sapiens
QDENPVVHFFKNIVTPRTP

SEQ ID NO: 366 - protein, 20 aa, Bos taurus
RQDENYEEAIVHLKVAALGS

SEQ ID NO: 367 - protein, 23 aa, Bos taurus
RWFREKVSPAVFVSREGQEQEGE

SEQ ID NO: 368 - protein, 24 aa, Bos taurus
SPNVSAKGMELRWFREKVSPAVFV

SEQ ID NO: 369 - protein, 18 aa, Bos taurus
TLSKIFKLGGRDSRSGSP

SEQ ID NO: 370 - protein, 13 aa, Homo sapiens
VHFFKNIVTPRTE

SEQ ID NO: 371 - protein, 24 aa, Bos taurus
VSREGQEQEGEMAEYRGRVSLVED

SEQ ID NO: 372 - protein, 23 aa, Homo sapiens
VTPRTPPPSQGKGRGLSLSRFSW

SEQ ID NO: 373 - protein, 18 aa, Homo sapiens
ALGQGPQFIFQYYEEEER

SEQ ID NO: 374 - protein, 19 aa, Homo sapiens
GLSLSRFSWGAEGQRPGFG

SEQ ID NO: 375 - protein, 19 aa, Homo sapiens
GLSLSRFSWGAEGQRPGFG

SEQ ID NO: 376 - protein, 14 aa, Homo sapiens
HKGFKGVDAQGTLS

SEQ ID NO: 377 - protein, 24 aa, Homo sapiens
KSHGRTQDENPVVHFFKNIVTPRT

SEQ ID NO: 378 - protein, 21 aa, Homo sapiens
LGQGPEFLIYFQGTGAADDSG

SEQ ID NO: 379 - protein, 20 aa, Homo sapiens
LLKDAIGEGKVTLRIRNVRF

SEQ ID NO: 380 - protein, 20 aa, Homo sapiens
QAPEYRGRTELLKDAIGEGK

SEQ ID NO: 381 - protein, 20 aa, Homo sapiens
RDHSYQEEAAMELKVEDPFY

SEQ ID NO: 382 - protein, 20 aa, Homo sapiens
RPPFSRVVHLYRNGKDQDGD

SEQ ID NO: 383 - protein, 20 aa, Homo sapiens
SDEGGFTCFFRDHSYQEEAA

SEQ ID NO: 384 - protein, 20 aa, Homo sapiens
SKIFKLGGRDSRSGSPMARR

SEQ ID NO: 385 - protein, 19 aa, Homo sapiens
SRGQHQAHSLERVCHCLGK

SEQ ID NO: 386 - protein, 20 aa, Homo sapiens
VTLRIRNVRFSDEGGFTCFF

SEQ ID NO: 387 - protein, 20 aa, Homo sapiens
YRNGKDQDGDQAPEYRGRTE

SEQ ID NO: 388 - protein, 9 aa, Homo sapiens
LMWAKIGPV

SEQ ID NO: 389 - protein, 9 aa, Homo sapiens
SLLLELEEV

SEQ ID NO: 390 - protein, 9 aa, Homo sapiens
VLFSSDFRI

SEQ ID NO: 391 - protein, 12 aa, Homo sapiens
APEYRGRTELLK

SEQ ID NO: 392 - protein, 12 aa, Homo sapiens
ATGMEVGWYRPP

SEQ ID NO: 393 - protein, 12 aa, Homo sapiens
DEGGFTCFFRDH

SEQ ID NO: 394 - protein, 12 aa, Homo sapiens
DHSYQEEAAMEL

SEQ ID NO: 395 - protein, 12 aa, Homo sapiens
DPFYWVSPGVLV

SEQ ID NO: 396 - protein, 12 aa, Homo sapiens
EEAAMELKVEDP

SEQ ID NO: 397 - protein, 12 aa, Homo sapiens
ELKVEDPFYWVS

SEQ ID NO: 398 - protein, 12 aa, Homo sapiens
GDEVELPCRISP

SEQ ID NO: 399 - protein, 12 aa, Homo sapiens
GEGKVTLRIRNV

SEQ ID NO: 400 - protein, 12 aa, Homo sapiens
GPRHPIRALVGD

SEQ ID NO: 401 - protein, 12 aa, Homo sapiens
GRTELLKDAIGE

SEQ ID NO: 402 - protein, 12 aa, Homo sapiens
IRALVGDEVELP

SEQ ID NO: 403 - protein, 19 aa, Homo sapiens
KNIVTPRTPPPSQGKGRGL

SEQ ID NO: 404 - protein, 12 aa, Homo sapiens
LKDAIGEGKVTL

SEQ ID NO: 405 - protein, 12 aa, Homo sapiens
LPCRISPGKNAT

SEQ ID NO: 406 - protein, 19 aa, Homo sapiens
MDHARHGFLPRHRDTGILD

SEQ ID NO: 407 - protein, 12 aa, Homo sapiens
NVRFSDEGGFTC

SEQ ID NO: 408 - protein, 12 aa, Homo sapiens
PPFSRVVHLYRN

SEQ ID NO: 409 - protein, 19 aa, Homo sapiens
PSQGKGRGLSLSRFSWGAE

SEQ ID NO: 410 - protein, 12 aa, Homo sapiens
QDGDQAPEYRGR

SEQ ID NO: 411 - protein, 12 aa, Homo sapiens
QFRVIGPRHPIR

SEQ ID NO: 412 - protein, 19 aa, Homo sapiens
QRPGFGYGGRASDYKSAHK

SEQ ID NO: 413 - protein, 12 aa, Homo sapiens
RNGKDQDGDQAP

SEQ ID NO: 414 - protein, 19 aa, Homo sapiens
SKIFKLGGRDSRSGSPMAR

SEQ ID NO: 415 - protein, 19 aa, Homo sapiens
SLPQKSHGRTQDENPVVHF

SEQ ID NO: 416 - protein, 12 aa, Homo sapiens
SPGKNATGMEVG

SEQ ID NO: 417 - protein, 12 aa, Homo sapiens
SSYAGQFRVIGP

SEQ ID NO: 418 - protein, 9 aa, Homo sapiens
SWGAEGQRP

SEQ ID NO: 419 - protein, 10 aa, Homo sapiens
SWGAEGQRPG

SEQ ID NO: 420 - protein, 12 aa, Homo sapiens
TLRIRNVRFSDE

SEQ ID NO: 421 - protein, 12 aa, Homo sapiens
VGWYRPPFSRVV

SEQ ID NO: 422 - protein, 12 aa, Homo sapiens
VVHLYRNGKDQD

SEQ ID NO: 423 - protein, 8 aa, Homo sapiens
WGAEGQRP

SEQ ID NO: 424 - protein, 10 aa, Homo sapiens
WGAEGQRPGF

SEQ ID NO: 425 - protein, 5 aa, Homo sapiens
AAMEL

SEQ ID NO: 426 - protein, 5 aa, Homo sapiens
ADARM

SEQ ID NO: 427 - protein, 5 aa, Homo sapiens
AHRET

SEQ ID NO: 428 - protein, 15 aa, Bacillus subtilis
ALAVLHFYPDKGAKN

SEQ ID NO: 429 - protein, 21 aa, unidentified [sequence omitted]

SEQ ID NO: 430 - protein, 21 aa, Homo sapiens
ALGQGPQFIFQYYEEEERQRG

SEQ ID NO: 431 - protein, 21 aa, Homo sapiens
ASTMDHARHGFLPRHRDTGIL

SEQ ID NO: 432 - protein, 15 aa, unidentified
  REGION 1..15: note = epitope involved in multiple sclerosis
DFARVHFIRALHGSG

SEQ ID NO: 433 - protein, 15 aa, Haemophilus influenzae
DFARVHFISALHGSG

SEQ ID NO: 434 - protein, 21 aa, Homo sapiens
DPGHGLRLIHYSYGVKDTDKG

SEQ ID NO: 435 - protein, 21 aa, Homo sapiens
DPGLGLRLIYFSYDVKMKEKG

SEQ ID NO: 436 - protein, 20 aa, Homo sapiens
GNFPDRFSGHQFPNYSSELN

SEQ ID NO: 437 - protein, 19 aa, Homo sapiens
GQGPQFIFQYYEEEERQRG

SEQ ID NO: 438 - protein, 15 aa, Homo sapiens
GRASDYKSAHKGFKG

SEQ ID NO: 439 - protein, 18 aa, Cavia porcellus
GTLSKIFKLGGRDSRSGS

SEQ ID NO: 440 - protein, 5 aa, Homo sapiens
HRTFE

SEQ ID NO: 441 - protein, 5 aa, Homo sapiens
HSYQE

SEQ ID NO: 442 - protein, 6 aa, Homo sapiens
KTGQFL

SEQ ID NO: 443 - protein, 21 aa, Homo sapiens
KTRGQQVTLRCSPKSGHDTVS

SEQ ID NO: 444 - protein, 20 aa, Homo sapiens
LVKRTGEKVFLECVQDMDHE

SEQ ID NO: 445 - protein, 16 aa, Homo sapiens
NALLLGDSALYLCASS

SEQ ID NO: 446 - protein, 24 aa, Cavia porcellus
PARTAHYGSLPQKSGRSQDENPVV

SEQ ID NO: 447 - protein, 18 aa, Homo sapiens
PKSGHDTVSWYQQALGQG

SEQ ID NO: 448 - protein, 19 aa, Homo sapiens
PNYSSELNVNALLLGDSAL

SEQ ID NO: 449 - protein, 40 aa, Homo sapiens
PSQGKGRGLSLSRFSWGAEGQRPGFGYGGRASDYKSAHKG

SEQ ID NO: 450 - protein, 5 aa, Homo sapiens
QAPEY

SEQ ID NO: 451 - protein, 15 aa, Mycobacterium avium
QRCRVHFLRNVLAQV

SEQ ID NO: 452 - protein, 15 aa, Mycobacterium tuberculosis
QRCRVHFMRNLYTAV

SEQ ID NO: 453 - protein, 19 aa, Homo sapiens
QYYEEEERQRGNFPDRFSG

SEQ ID NO: 454 - protein, 16 aa, Homo sapiens
SHGRTQDENPVVHFFK

SEQ ID NO: 455 - protein, 20 aa, Homo sapiens
SKIFKLGGRDSRSGSPMARR

SEQ ID NO: 456 - protein, 21 aa, Homo sapiens
SKKFLKIMFSYNNKELIINET

SEQ ID NO: 457 - protein, 19 aa, Cavia porcellus
SLSRFSWGAEGQKPGFGYG

SEQ ID NO: 458 - protein, 17 aa, Homo sapiens
SWGAEGQRPGFGYGGRA

SEQ ID NO: 459 - protein, 20 aa, Homo sapiens
SWYQQALGQGPQFIFQYYEE

SEQ ID NO: 460 - protein, 22 aa, Homo sapiens
TSGVTQSPHTLIKTRGQQVTLR

SEQ ID NO: 461 - protein, 15 aa, Staphylococcus aureus
VLARLHFYRNDVHKE

SEQ ID NO: 462 - protein, 5 aa, Homo sapiens
VTLRI

SEQ ID NO: 463 - protein, 20 aa, unidentified
  REGION 1..20: note = epitope involved in multiple sclerosis
YDENPVVHFFKNIVTPRTPP

SEQ ID NO: 464 - protein, 15 aa, Human alphaherpesvirus sp.
YRNLVWFIKKNTRYP

SEQ ID NO: 465 - protein, 20 aa, Homo sapiens
APKRGSGKDSHHPARTAHYG

SEQ ID NO: 466 - protein, 20 aa, Homo sapiens
ASDYKSAHKGFKGVDAQGTL

SEQ ID NO: 467 - protein, 23 aa, Homo sapiens
ATASTMDHARHGFLPRHRDTGIL

SEQ ID NO: 468 - protein, 45 aa, Homo sapiens
FGGDRGAPKRGSGKDSHHPARTAHYGSLPQKSHGRTQDENPVVHF

SEQ ID NO: 469 - protein, 19 aa, Homo sapiens
GAPKRGSGKDSHHPARTAH

SEQ ID NO: 470 - protein, 18 aa, Homo sapiens
GFGYGGRASDYKSAHKGF

SEQ ID NO: 471 - protein, 15 aa, Homo sapiens
HKGFKGVDAQGTLSK

SEQ ID NO: 472 - protein, 20 aa, Homo sapiens
IGRFFGGDRGAPKRGSGKDS

SEQ ID NO: 473 - protein, 12 aa, Cavia porcellus
IVTPRTPPPSQG

SEQ ID NO: 474 - protein, 20 aa, Homo sapiens
LCNMYKKDSHHPARTAHYGS

SEQ ID NO: 475 - protein, 21 aa, Homo sapiens
LDSIGRFFGGDRGAPKRGSGK

SEQ ID NO: 476 - protein, 19 aa, Homo sapiens
LGQGPEFLTYFQNEAQLKS

SEQ ID NO: 477 - protein, 20 aa, Homo sapiens
LPSHARSQPGLCNMYKKDSH

SEQ ID NO: 478 - protein, 19 aa, Homo sapiens
PRHRDTGILDSIGRFFGGD

SEQ ID NO: 479 - protein, 20 aa, Homo sapiens
PRTPPPSQGKGAEGQRPGFG

SEQ ID NO: 480 - protein, 20 aa, Homo sapiens
RGAPKRGSGKVPWLKPGRSP

SEQ ID NO: 481 - protein, 20 aa, Homo sapiens
SLPQKSHGRTQDENPVVHFF

SEQ ID NO: 482 - protein, 20 aa, Homo sapiens
TQDENPVVHFFKNIVTPRTP

SEQ ID NO: 483 - protein, 18 aa, Homo sapiens
TQDQDPBBHFFKNIVTPR

SEQ ID NO: 484 - protein, 20 aa, Homo sapiens
VPWLKPGRSPLPSHARSQPG

SEQ ID NO: 485 - protein, 24 aa, Homo sapiens
VTPRTPPPSQGKGRGLSLSRFSWG

SEQ ID NO: 486 - protein, 19 aa, Homo sapiens
APKRGSGKDSHHPARTAHY

SEQ ID NO: 487 - protein, 27 aa, Homo sapiens
ASQKRPSQRHGSKYLATASTMDHARHG

SEQ ID NO: 488 - protein, 13 aa, Homo sapiens
DPVVHFFKNIVTP

SEQ ID NO: 489 - protein, 19 aa, Homo sapiens
EGQRPGFGYGGRASDYKSA

SEQ ID NO: 490 - protein, 19 aa, Homo sapiens
FFKNIVTPRTPPPSQGKGR

SEQ ID NO: 491 - protein, 43 aa, Homo sapiens
FGGDRGAPKRGSGKDSHHPARTAHYGSLPQKSHGRTQDENPVV

SEQ ID NO: 492 - protein, 12 aa, Mus musculus
FKNIVTPRTPPP

SEQ ID NO: 493 - protein, 40 aa, Homo sapiens
GLSLSRFSWGAEGQRPGFGYGGRASDYKSAHKGFKGVDAQ

SEQ ID NO: 494 - protein, 19 aa, Homo sapiens
GRASDYKSAHKGFKGVDAQ

SEQ ID NO: 495 - protein, 17 aa, Homo sapiens
HHPARTAHYGSLPQKSH

SEQ ID NO: 496 - protein, 19 aa, Homo sapiens
IGRFFGGDRGAPKRGSGKD

SEQ ID NO: 497 - protein, 19 aa, Homo sapiens
KGFKGVDAQGTLSKIFKLG

SEQ ID NO: 498 - protein, 24 aa, Homo sapiens
KNIVTPRTPPPSQGKGRGLSLSRF

SEQ ID NO: 499 - protein, 29 aa, Homo sapiens
KRGSGKDSHHPARTAHYGSLPQKSHGRTQ

SEQ ID NO: 500 - protein, 8 aa, Homo sapiens
LGRAGLTY

SEQ ID NO: 501 - protein, 19 aa, Homo sapiens
LSLSRFSWGAEGQRPGFGY

SEQ ID NO: 502 - protein, 18 aa, Homo sapiens
PGFGYGGRASDYKSAHKG

SEQ ID NO: 503 - protein, 19 aa, Homo sapiens
PPPSQGKGRGLSLSRFSWG

SEQ ID NO: 504 - protein, 33 aa, Oryctolagus cuniculus
PPPSQGKGRGTVLSRFSWGAEGQKPGFGYGGRA

SEQ ID NO: 505 - protein, 17 aa, Homo sapiens
QDENPVVHFFKNIVTPR

SEQ ID NO: 506 - protein, 23 aa, Homo sapiens
QDENPVVHFFKNIVTPRTPPPSQ

SEQ ID NO: 507 - protein, 27 aa, Homo sapiens
RASDYKSAHKGFKGVDAQGTLSKIFKL

SEQ ID NO: 508 - protein, 26 aa, Homo sapiens
RFFGGDRGAPKRGSGKDSHHPARTAH

SEQ ID NO: 509 - protein, 26 aa, Homo sapiens
RGLSLSRFSWGAEGQRPGFGYGGRAS

SEQ ID NO: 510 - protein, 30 aa, Homo sapiens
RHGFLPRHRDTGILDSIGRFFGGDRGAPKR

SEQ ID NO: 511 - protein, 19 aa, Homo sapiens
RHRDTGILDSIGRFFGGDR

SEQ ID NO: 512 - protein, 28 aa, Homo sapiens
RTAHYGSLPQKSHGRTQDENPVVHFFKN

SEQ ID NO: 513 - protein, 17 aa, Homo sapiens
SLPQKSHGRTQDENPVV

SEQ ID NO: 514 - protein, 15 aa, Homo sapiens
SSLGRAGLTYEQYFG

SEQ ID NO: 515 - protein, 31 aa, Homo sapiens
TASTMDHARHGFLPRHRDTGILDSIGRFFGG

SEQ ID NO: 516 - protein, 21 aa, Homo sapiens
AHSLERVCHCLGKWLGHPDKF

SEQ ID NO: 517 - protein, 21 aa, Homo sapiens
AVRQIFGDYKTTICGKGLSAT

SEQ ID NO: 518 - protein, 14 aa, Homo sapiens
CNMYKDSHHPARTA

SEQ ID NO: 519 - protein, 20 aa, Homo sapiens
CQSIAFPSKTSASIGSLCAD

SEQ ID NO: 520 - protein, 21 aa, Homo sapiens
DQAPEYRGRTELLKDAIGEGK

SEQ ID NO: 521 - protein, 20 aa, Homo sapiens
EGKVTLRIRNVRFSDEGGFT

SEQ ID NO: 522 - protein, 21 aa, Homo sapiens
ELKVEDPFYWVSPGVLVLLAV

SEQ ID NO: 523 - protein, 21 aa, Homo sapiens
EVELPCRISPGKNATGMEVGW

SEQ ID NO: 524 - protein, 21 aa, Homo sapiens
EYLINVIHAFQYVIYGTASFF

SEQ ID NO: 525 - protein, 21 aa, Homo sapiens
FFGVALFCGCGHEALTGTEKL

SEQ ID NO: 526 - protein, 19 aa, Homo sapiens
FGGDRGAPKRGSGKVPWLK

SEQ ID NO: 527 - protein, 21 aa, Homo sapiens
FKGVDAQGTLSKIFKLGGRDS

SEQ ID NO: 528 - protein, 21 aa, Homo sapiens
FMIAATYNFAVLKLMGRGTKF

SEQ ID NO: 529 - protein, 19 aa, Homo sapiens
FSRVVHLYRNGKDQDGDQA

SEQ ID NO: 530 - protein, 21 aa, Homo sapiens
FSWGAEGQRPGFGYGGRASDY

SEQ ID NO: 531 - protein, 20 aa, Homo sapiens
GAPKRGSGKDSHHPARTAHY

SEQ ID NO: 532 - protein, 21 aa, Homo sapiens
GCGHEALTGTEKLIETYFSKN

SEQ ID NO: 533 - protein, 21 aa, Homo sapiens
GFLPRHRDTGILDSIGRFFGG

SEQ ID NO: 534 - protein, 21 aa, Homo sapiens
GFTCFFRDHSYQEEAAMELKV

SEQ ID NO: 535 - protein, 21 aa, Homo sapiens
GFYTTGAVRQIFGDYKTTICG

SEQ ID NO: 536 - protein, 21 aa, Homo sapiens
GILDSIGRFFGGDRGAPKRGS

SEQ ID NO: 537 - protein, 21 aa, Homo sapiens
GQFRVIGPRHPIRALVGDEVE

SEQ ID NO: 538 - protein, 21 aa, Homo sapiens
GRGSRGQHQAHSLERVCHCLG

SEQ ID NO: 539 - protein, 21 aa, Homo sapiens
GRSPLPSHARSQPGLCNMYKD

SEQ ID NO: 540 - protein, 20 aa, Homo sapiens
GVLPWNAFPGKVCGSNLLSI

SEQ ID NO: 541 - protein, 21 aa, Homo sapiens
HCLGKWLGHPDKFVGITYALT

SEQ ID NO: 542 - protein, 20 aa, Homo sapiens
HGSKYLATASTMDHARHGFL

SEQ ID NO: 543 - protein, 12 aa, Homo sapiens
HHPARTAHYGSL

SEQ ID NO: 544 - protein, 21 aa, Homo sapiens
HPIRALVGDEVELPCRISPGK

SEQ ID NO: 545 - protein, 21 aa, Homo sapiens
ITVGLVFLCLQYRLRGKLRAE

SEQ ID NO: 546 - protein, 21 aa, Homo sapiens
KGRGLSLSRFSWGAEGQRPGF

SEQ ID NO: 547 - protein, 21 aa, Homo sapiens
KTTICGKGLSATVTGGQKGRG

SEQ ID NO: 548 - protein, 22 aa, Homo sapiens
LDSIGRFFGGDRGAPKRGSGKD

SEQ ID NO: 549 - protein, 21 aa, Homo sapiens
LQYRLRGKLRAEIENLHRTFD

SEQ ID NO: 550 - protein, 21 aa, Homo sapiens
LSKIFKLGGRDSRSGSPMARR

SEQ ID NO: 551 - protein, 21 aa, Homo sapiens
LYGALLLAEGFYTTGAVRQIF

SEQ ID NO: 552 - protein, 21 aa, Homo sapiens
MYKDSHHPARTAHYGSLPQKS

SEQ ID NO: 553 - protein, 21 aa, Homo sapiens
PGFGYGGRASDYKSAHKGFKG

SEQ ID NO: 554 - protein, 21 aa, Homo sapiens
PGKNATGMEVGWYRPPFSRVV

SEQ ID NO: 555 - protein, 16 aa, Homo sapiens
PKRGSGKDSHHPARTA

SEQ ID NO: 556 - protein, 16 aa, Homo sapiens
PKRGSGKVPWLKPGRS

SEQ ID NO: 557 - protein, 21 aa, Homo sapiens
PQKSHGRTQDENPVVHFFKNI

SEQ ID NO: 558 - protein, 21 aa, Homo sapiens
PRTPPPSQGKGRGLSLSRFSW

SEQ ID NO: 559 - protein, 21 aa, Homo sapiens
RAEIENLHRTFDPHFLRVPCW

SEQ ID NO: 560 - protein, 21 aa, Homo sapiens
RNVRFSDEGGFTCFFRDHSYQ

SEQ ID NO: 561 - protein, 21 aa, Homo sapiens
SDYKSAHKGFKGVDAQGTLSK

SEQ ID NO: 562 - protein, 21 aa, Homo sapiens
SGKVPWLKPGRSPLPSHARSQ

SEQ ID NO: 563 - protein, 11 aa, Homo sapiens
SIGRFFGGDRG

SEQ ID NO: 564 - protein, 21 aa, Homo sapiens
SLCADARMYGVLPWNAFPGKV

SEQ ID NO: 565 - protein, 20 aa, Homo sapiens
SYQEEAAMELKVEDPFYWVS

SEQ ID NO: 566 - protein, 21 aa, Homo sapiens
TELLKDAIGEGKVTLRIRNVR

SEQ ID NO: 567 - protein, 20 aa, Homo sapiens
TFDPHFLRVPCWKITLFVIV

SEQ ID NO: 568 - protein, 21 aa, Homo sapiens
TPRTPPPSQGKGAEGQRPGFG

SEQ ID NO: 569 - protein, 21 aa, Homo sapiens
VALIICYNWLHRRLAGQFLEE

SEQ ID NO: 570 - protein, 21 aa, Homo sapiens
VFACSAVPVYIYFNTWTTCQS

SEQ ID NO: 571 - protein, 21 aa, Homo sapiens
VIVPVLGPLVALIICYNWLHR

SEQ ID NO: 572 - protein, 21 aa, Homo sapiens
YFSKNYQDYEYLINVIHAFQY

SEQ ID NO: 573 - protein, 21 aa, Homo sapiens
YIYFNTWTTCQSIAFPSKTSA

SEQ ID NO: 574 - protein, 20 aa, Homo sapiens
YNWLHRRLAGQFLEELRNPF

SEQ ID NO: 575 - protein, 21 aa, Homo sapiens
YRNGKDQDGDQAPEYRGRTEL

SEQ ID NO: 576 - protein, 32 aa, Homo sapiens
AAFVGAAATLVSLLTFMIAATYNFAVLKLMGR

SEQ ID NO: 577 - protein, 14 aa, Mus musculus
ACSAVTVYIYFNTW

SEQ ID NO: 578 - protein, 19 aa, Homo sapiens
ASDYKSAHKGFKGVDAQGT

SEQ ID NO: 579 - protein, 20 aa, Homo sapiens
AVRQIFGDYKTTICGKGLSA

SEQ ID NO: 580 - protein, 16 aa, Mus musculus
DYKTTICGKGLSATVT

SEQ ID NO: 581 - protein, 31 aa, Homo sapiens
FGVALFCGCEVEALTGTEKLIETYFSKNYQD

SEQ ID NO: 582 - protein, 19 aa, Homo sapiens
FKGVDAQGTLSKIFKLGGR

SEQ ID NO: 583 - protein, 14 aa, Mus musculus
FSKNYQDYEYLINV

SEQ ID NO: 584 - protein, 19 aa, Homo sapiens
GLRLIHYSVGAGITDQGEV

SEQ ID NO: 585 - protein, 40 aa, Homo sapiens
GSKYLATASTMDHARHGFLPRHRDTGILDSIGRFFGGDRG

SEQ ID NO: 586 - protein, 32 aa, Homo sapiens
GTASFFFLYGALLLAYGFYTTGAVRQIFGDYK

SEQ ID NO: 587 - protein, 19 aa, Homo sapiens
HHPARTAHYGSLPQKSHGR

SEQ ID NO: 588 - protein, 29 aa, Homo sapiens
IGRFFGGDRGAPKRGSGKDSHHPARTAHY

SEQ ID NO: 589 - protein, 32 aa, Homo sapiens
KGRGSRGQHQAHSLERVCHCLGCWLGHPDKFV

SEQ ID NO: 590 - protein, 32 aa, Homo sapiens
KVCGSNLLSICKTAEFQMTFHLFIAAFVGAAA

SEQ ID NO: 591 - protein, 15 aa, Mus musculus
LFIAAFVGAAATLVS

SEQ ID NO: 592 - protein, 32 aa, Homo sapiens
LGHPDKFVGITYALTVVWLLVFACSAVPVYIY

SEQ ID NO: 593 - protein, 31 aa, Homo sapiens
LLECCARCLVGAPFASLVATGLCFFGVALFC

SEQ ID NO: 594 - protein, 35 aa, Mus musculus
PWNAFPGKVCGSNLLSICKTAEFQMTFHLFIAAFV

SEQ ID NO: 595 - protein, 20 aa, Homo sapiens
QDENPVVHFFKNIVTPRTPP

SEQ ID NO: 596 - protein, 31 aa, Homo sapiens
RQIFGDYKTTCGKGLSATVTGGQKGRGSRGQ

SEQ ID NO: 597 - protein, 32 aa, Homo sapiens
SASIGTLCADARMYGVLPWNAFFGKVCGSNLL

SEQ ID NO: 598 - protein, 32 aa, Homo sapiens
SAVPVYIYFNTWTTCQSIAAPCKTSASIGTLC

SEQ ID NO: 599 - protein, 15 aa, Mus musculus
TVTGGQKGRGSRGQH

SEQ ID NO: 600 - protein, 32 aa, Homo sapiens
YFSKNYQDYEYLINVIHAFQYVIYGTASFFFL

SEQ ID NO: 601 - protein, 12 aa, Homo sapiens
PVVHFFKNIVTP

SEQ ID NO: 602 - protein, 9 aa, Homo sapiens
KVEDPFYWV

SEQ ID NO: 603 - protein, 11 aa, Homo sapiens
PTRAPSGPRPP

SEQ ID NO: 604 - protein, 11 aa, Homo sapiens
RRREGPDRSPR

SEQ ID NO: 605 - protein, 15 aa, Human alphaherpesvirus sp.
DFEVVTFLKDVLPEF

SEQ ID NO: 606 - protein, 15 aa, Pseudomonas aeruginosa
DRLLMLFAKDVVSRN

SEQ ID NO: 607 - protein, 15 aa, unidentified
  REGION 1..15: note = epitope involved in multiple sclerosis
ENPVVHYFRNIVTPR

SEQ ID NO: 608 - protein, 15 aa, Human alphaherpesvirus sp.
FRQLVHFVRDFAQLL

SEQ ID NO: 609 - protein, 13 aa, Human alphaherpesvirus sp.
GGRRLFFVKAHVR

SEQ ID NO: 610 - protein, 15 aa, Mammalian orthoreovirus
MARAAFLFKTVGFGG

SEQ ID NO: 611 - protein, 9 aa, Homo sapiens
KLIETYFSK

SEQ ID NO: 612 - protein, 9 aa, Saccharomyces cerevisiae
KLVETYISK

SEQ ID NO: 613 - protein, 21 aa, Homo sapiens
AAGRGLQLLFYSIGIDQISSE

SEQ ID NO: 614 - protein, 21 aa, Homo sapiens
ALGQGPEFLTYFNYEAQPDKS

SEQ ID NO: 615 - protein, 21 aa, Homo sapiens
ALGQGPEFLTYFNYEAQQDKS

SEQ ID NO: 616 - protein, 21 aa, Homo sapiens
ALGQGPEFLTYFQNEAQLDKS

SEQ ID NO: 617 - protein, 21 aa, Homo sapiens
DLGHGLRLIHYSYGVQDTNKG

SEQ ID NO: 618 - protein, 21 aa, Homo sapiens
DLGLGLRLIHYSNTAGTTGKG

SEQ ID NO: 619 - protein, 21 aa, Homo sapiens
DPGEGPVLLIALYKAGELTSN

SEQ ID NO: 620 - protein, 21 aa, Homo sapiens
DPGKGPEFLFTLYSAGEEKEK

SEQ ID NO: 621 - protein, 21 aa, Homo sapiens
DPGKSLESLFVLLSNGAVKQE

SEQ ID NO: 622 - protein, 21 aa, Homo sapiens
DPGMELHLIHYSYGVNSTEKG

SEQ ID NO: 623 - protein, 21 aa, Homo sapiens
DPGMGLKLIYYSVGAGITDKG

SEQ ID NO: 624 - protein, 21 aa, Homo sapiens
DPGMGLRLIHYSVGAGITDQG

SEQ ID NO: 625 - protein, 21 aa, Homo sapiens
DPGMGLRLIHYSVGEGTTAKG

SEQ ID NO: 626 - protein, 21 aa, Homo sapiens
DPGMGLRRIHYSVAAGITDKG

SEQ ID NO: 627 - protein, 21 aa, Homo sapiens
DPGRGPVFLLLIRENEKEKRK

SEQ ID NO: 628 - protein, 21 aa, Homo sapiens
DSKKFLKIMFSYNNKELIINE

SEQ ID NO: 629 - protein, 21 aa, Homo sapiens
DTGRGPVSLTIMTFSENTKSN

SEQ ID NO: 630 - protein, 20 aa, Homo sapiens
EKKAPTFLFMLTSSGIEKKS

SEQ ID NO: 631 - protein, 21 aa, Homo sapiens
ELGKGPQLIIDIRSNVGEKKD

SEQ ID NO: 632 - protein, 21 aa, Homo sapiens
ELGKRPQLIIDIRSNVGEKKD

SEQ ID NO: 633 - protein, 21 aa, Homo sapiens
EPGAGLQLLTYIFSNMDMKQD

SEQ ID NO: 634 - protein, 21 aa, Homo sapiens
EPGEGPVLLVTVVTGGEVKKL

SEQ ID NO: 635 - protein, 21 aa, Homo sapiens
ESGKGPQFIIDIRSNMDKRQG

SEQ ID NO: 636 - protein, 21 aa, Homo sapiens
ETAKTPEALFVMTLNGDEKKK

SEQ ID NO: 637 - protein, 18 aa, Homo sapiens
FPGCAPRLLVKGSKPSQQ

SEQ ID NO: 638 - protein, 21 aa, Homo sapiens
FPGKGPALLIAIRPDVSEKKE

SEQ ID NO: 639 - protein, 22 aa, Homo sapiens
FPKKSLMLMATSNEGSKATYEQ

SEQ ID NO: 640 - protein, 22 aa, Homo sapiens
FPKKSLMQIATSNEGSKATYEQ

SEQ ID NO: 641 - protein, 22 aa, Homo sapiens
FPKQSLMLMATSNEGSKATYEQ

SEQ ID NO: 642 - protein, 19 aa, Homo sapiens
FPSQGPRFIIQGYKTKVTN

SEQ ID NO: 643 - protein, 21 aa, Homo sapiens
GPGQDPQFLISFYEKMQSDKG

SEQ ID NO: 644 - protein, 20 aa, Homo sapiens
HAGEAPTFLSYNVLDGLEEK

SEQ ID NO: 645 - protein, 20 aa, Homo sapiens
HDGGAPTFLSYNGLDGLEET

SEQ ID NO: 646 - protein, 19 aa, Homo sapiens
HPAGAIVSLFMLSSQKKKH

SEQ ID NO: 647 - protein, 22 aa, Homo sapiens
HPNKGLQLLLKYTSAATLVKGI

SEQ ID NO: 648 - protein, 19 aa, Homo sapiens
IHSQGPQYIIHGLKNNETN

SEQ ID NO: 649 - protein, 21 aa, Homo sapiens
ILGQKVEFLVSFYNNEISEKS

SEQ ID NO: 650 - protein, 21 aa, Homo sapiens
KAKKPPELMFVYSYEKLSINE

SEQ ID NO: 651 - protein, 21 aa, Homo sapiens
KHGEAPVFLMILLKGGEQKGH

SEQ ID NO: 652 - protein, 21 aa, Homo sapiens
KHGEAPVFLMILLKGGEQMRR

SEQ ID NO: 653 - protein, 21 aa, Homo sapiens
KLEEELKFLVYFQNEELIQKA

SEQ ID NO: 654 - protein, 21 aa, Homo sapiens
KSSQAPKLLFHYYDKDFNNEA

SEQ ID NO: 655 - protein, 21 aa, Homo sapiens
KSSQAPKLLFHYYNKDFNNEA

SEQ ID NO: 656 - protein, 21 aa, Homo sapiens
KYGEGLIFLMMLQKGGEEKSH

SEQ ID NO: 657 - protein, 19 aa, Homo sapiens
LPSQGPEYVIHGLTSNVNN

SEQ ID NO: 658 - protein, 19 aa, Homo sapiens
NPWGQLINLFYIPSGTKQN

SEQ ID NO: 659 - protein, 21 aa, Homo sapiens
NQNKEFMLLISFQNEQVLQET

SEQ ID NO: 660 - protein, 21 aa, Homo sapiens
NSGRGLVHLILIRSNEREKHS

SEQ ID NO: 661 - protein, 22 aa, Homo sapiens
PPSGELVFLIRRNSFDEQNEIS

SEQ ID NO: 662 - protein, 22 aa, Homo sapiens
PPSRQMILVIRQEAYKQQNATE

SEQ ID NO: 663 - protein, 22 aa, Homo sapiens
PSSGEMIFLIYQGSYDEQNATE

SEQ ID NO: 664 - protein, 21 aa, Homo sapiens
RPGGHPVFLIQLVKSGEVKKQ

SEQ ID NO: 665 - protein, 21 aa, Homo sapiens
SAKKPLELMFVYNFKEQTENN

SEQ ID NO: 666 - protein, 21 aa, Homo sapiens
SAKKPLELMFVYSLEERVENN

SEQ ID NO: 667 - protein, 21 aa, Homo sapiens
SLDQGLQFLIHYYNGEERAKG

SEQ ID NO: 668 - protein, 21 aa, Homo sapiens
SLDQGLQFLIQYYNGEERAKG

SEQ ID NO: 669 - protein, 21 aa, Homo sapiens
TLEEELKFFIYFQNEEIIQKA

SEQ ID NO: 670 - protein, 21 aa, Homo sapiens
TLGQGLQFLFEYFSETQRNKG

SEQ ID NO: 671 - protein, 21 aa, Homo sapiens
TLGQGPEFLTYFQNEAQLEKS

SEQ ID NO: 672 - protein, 16 aa, Homo sapiens
VFLCLQYRLRGKLRAE

SEQ ID NO: 673 - protein, 21 aa, Homo sapiens
VLGQGPQFIFQYYEKEERGRG

SEQ ID NO: 674 - protein, 21 aa, Homo sapiens
VLKNEFKFLVSFQNENVFDET

SEQ ID NO: 675 - protein, 21 aa, Homo sapiens
VMGKEIKFLLHFVKESKQDES

SEQ ID NO: 676 - protein, 21 aa, Homo sapiens
YPAEGPTFLISISSIKDKNED

SEQ ID NO: 677 - protein, 21 aa, Homo sapiens
YPGEGLQLLLKATKADDKGSN

SEQ ID NO: 678 - protein, 22 aa, Homo sapiens
YPNQGLQLLLKYLSGSTLVESI

SEQ ID NO: 679 - protein, 22 aa, Homo sapiens
YPNQGLQLLLKYLSGSTLVKGI

SEQ ID NO: 680 - protein, 22 aa, Homo sapiens
YPNQGLQLLLKYTSAATLVKGI

SEQ ID NO: 681 - protein, 22 aa, Homo sapiens
YPNQGLQLLLKYTSGATLVKGI

SEQ ID NO: 682 - protein, 22 aa, Homo sapiens
YPNQGLQLLLKYTTGATLVKGI

SEQ ID NO: 683 - protein, 22 aa, Homo sapiens
YPNRGLQFLLKYITGDNLVKGS

SEQ ID NO: 684 - protein, 17 aa, Homo sapiens
YPSKPLQLLQRETMENS

SEQ ID NO: 685 - protein, 20 aa, Homo sapiens
YSGKSPELIMFIYSNGDKED

SEQ ID NO: 686 - protein, 18 aa, Homo sapiens
YSRQRLQLLLRHISRESI

SEQ ID NO: 687 - protein, 8 aa, Homo sapiens
ADARMYGV

SEQ ID NO: 688 - protein, 20 aa, Human alphaherpesvirus sp.
DPGEGPSTGPRGQGDGGRRK

SEQ ID NO: 689 - protein, 20 aa, Human alphaherpesvirus sp.
EADYFEYHQEGGPDGEPDVP

SEQ ID NO: 690 - protein, 8 aa, Homo sapiens
EALTGTEK

SEQ ID NO: 691 - protein, 20 aa, Human alphaherpesvirus sp.
GCKGTHGGTGAGAGAGGAGA

SEQ ID NO: 692 - protein, 31 aa, Human alphaherpesvirus sp.
GEADYFEYHQEGGPDGEPDVPPGAIEQGPAD

SEQ ID NO: 693 - protein, 20 aa, Human alphaherpesvirus sp.
GGPDGEPDVPPGAIEQGPAD

SEQ ID NO: 694 - protein, 29 aa, Human alphaherpesvirus sp.
GGPDGEPDVPPGAIEQGPADDPGEGPSTG

SEQ ID NO: 695 - protein, 20 aa, Human alphaherpesvirus sp.
GGRPGAPGGSGSGPRHRDGV

SEQ ID NO: 696 - protein, 20 aa, Human alphaherpesvirus sp.
GNGLGEKGDTSGPEGSGGSG

SEQ ID NO: 697 - protein, 20 aa, Human alphaherpesvirus sp.
GRRPFFHPVGEADYFEYHQE

SEQ ID NO: 698 - protein, 20 aa, Human alphaherpesvirus sp.
GSGPRHRDGVRRPQKRPSCI

SEQ ID NO: 699 - protein, 30 aa, Human alphaherpesvirus sp.
GSGPRHRDGVRRPQKRPSCIGCKGTHGGTG

SEQ ID NO: 700 - protein, 9 aa, Homo sapiens
HARHGFLPR

SEQ ID NO: 701 - protein, 9 aa, Homo sapiens
IICYNWLHR

SEQ ID NO: 702 - protein, 9 aa, Homo sapiens
KLRAEIENL

SEQ ID NO: 703 - protein, 9 aa, Homo sapiens
KQRIKSQER

SEQ ID NO: 704 - protein, 10 aa, Homo sapiens
KRPSQRHGSK

SEQ ID NO: 705 - protein, 10 aa, Homo sapiens
LLAVLPVLLL

SEQ ID NO: 706 - protein, 9 aa, Homo sapiens
LLECCARCL

SEQ ID NO: 707 - protein, 9 aa, Homo sapiens
LQYRLRGKL

SEQ ID NO: 708 - protein, 8 aa, Homo sapiens
LRIRNVRF

SEQ ID NO: 709 - protein, 9 aa, Homo sapiens
LRKFSSLCY

SEQ ID NO: 710 - protein, 20 aa, Human alphaherpesvirus sp.
MSDEGPGTGPGNGLGEKGDT

SEQ ID NO: 711 - protein, 20 aa, Human alphaherpesvirus sp.
PGAIEQGPADDPGEGPSTGP

SEQ ID NO: 712 - protein, 7 aa, Human alphaherpesvirus sp.
PPPGRRP

SEQ ID NO: 713 - protein, 20 aa, Human alphaherpesvirus sp.
PQRRGGDNHGRGRGRGRGRG

SEQ ID NO: 714 - protein, 20 aa, Human alphaherpesvirus sp.
RGRGRGRGRGGGRPGAPGGS

SEQ ID NO: 715 - protein, 20 aa, Human alphaherpesvirus sp.
RRPQKRPSCIGCKGTHGGTG

SEQ ID NO: 716 - protein, 9 aa, Homo sapiens
RTELLKDAI

SEQ ID NO: 717 - protein, 10 aa, Homo sapiens
RVVHLYRNGK

SEQ ID NO: 718 - protein, 20 aa, Human alphaherpesvirus sp.
SGPEGSGGSGPQRRGGDNHG

SEQ ID NO: 719 - protein, 20 aa, Human alphaherpesvirus sp.
SGSPPRRPPPGRRPFFHPVG

SEQ ID NO: 720 - protein, 9 aa, Homo sapiens
SLDVMASQK

SEQ ID NO: 721 - protein, 36 aa, Human alphaherpesvirus sp.
SSQSSSSGSPPRRPPPGRRPFFHPVGEADYFEYHQE

SEQ ID NO: 722 - protein, 9 aa, Homo sapiens
TAHYGSLPQ

SEQ ID NO: 723 - protein, 20 aa, Homo sapiens
LSLSRFSWGAEGQRPGFGYG

SEQ ID NO: 724 - protein, 19 aa, Homo sapiens
AAHLPAEFTPAVHASLDKF

SEQ ID NO: 725 - protein, 15 aa, Homo sapiens
AAVGTSAAPVPSDNH

SEQ ID NO: 726 - protein, 13 aa, Homo sapiens
AEPPPPPPEPARI

SEQ ID NO: 727 - protein, 12 aa, Homo sapiens
AGEYDHLPEQAF

SEQ ID NO: 728 - protein, 11 aa, Homo sapiens
ALMEGGENGPW

SEQ ID NO: 729 - protein, 11 aa, Homo sapiens
ALMLAISHGRQ

SEQ ID NO: 730 - protein, 9 aa, Homo sapiens
ALYSGVHKK

SEQ ID NO: 731 - protein, 15 aa, Homo sapiens
AQVIILNHPGQISAG

SEQ ID NO: 732 - protein, 12 aa, Homo sapiens
ARKLIGDPNLEF

SEQ ID NO: 733 - protein, 10 aa, Homo sapiens
ASSSVLSSPA

SEQ ID NO: 734 - protein, 13 aa, Homo sapiens
ASVDLKNTGREEF

SEQ ID NO: 735 - protein, 14 aa, Homo sapiens
ASVDLKNTGREEFL

SEQ ID NO: 736 - protein, 16 aa, Homo sapiens
ASVDLKNTGREEFLTA

SEQ ID NO: 737 - protein, 10 aa, Homo sapiens
ATALPTGTSK

SEQ ID NO: 738 - protein, 9 aa, Homo sapiens
ATANQIILK

SEQ ID NO: 739 - protein, 9 aa, Homo sapiens
ATIIDILTK

SEQ ID NO: 740 - protein, 9 aa, Homo sapiens
ATVAGVHVK

SEQ ID NO: 741 - protein, 12 aa, Homo sapiens
ATVRQKLQDETN

SEQ ID NO: 742 - protein, 9 aa, Homo sapiens
ATVTPSPVK

SEQ ID NO: 743 - protein, 9 aa, Homo sapiens
AVALPLQTK

SEQ ID NO: 744 - protein, 12 aa, Homo sapiens
AVILPPLSPYFK

SEQ ID NO: 745 - protein, 9 aa, Homo sapiens
AVQRTLLEK

SEQ ID NO: 746 - protein, 9 aa, Homo sapiens
AVTDVIIAK

SEQ ID NO: 747 - protein, 17 aa, Homo sapiens
AVVDKAAEAGGAEEQYG

SEQ ID NO: 748 - protein, 9 aa, Homo sapiens
AVYSHVIQK

SEQ ID NO: 749 - protein, 12 aa, Homo sapiens
AWKRAEAIESSL

SEQ ID NO: 750 - protein, 10 aa, Homo sapiens
CPLSLAAQLD

SEQ ID NO: 751 - protein, 10 aa, Homo sapiens
DESGPSIVHR

SEQ ID NO: 752 - protein, 13 aa, Homo sapiens
DEWVKPKDMLGPK

SEQ ID NO: 753 - protein, 18 aa, Homo sapiens
DFAIVKFTKVLLQYTGHI

SEQ ID NO: 754 - protein, 14 aa, Homo sapiens
DGVIKVFNDMKVRK

SEQ ID NO: 755 - protein, 13 aa, Homo sapiens
DLPSEASASTAGP

SEQ ID NO: 756 - protein, 10 aa, Homo sapiens
DLPWFRTLSW

SEQ ID NO: 757 - protein, 13 aa, Homo sapiens
DLSQVAAISNDLK

SEQ ID NO: 758 - protein, 14 aa, Homo sapiens
DPPLIALDKDAPLR

SEQ ID NO: 759 - protein, 9 aa, Homo sapiens
DTDHYFLRY

SEQ ID NO: 760 - protein, 11 aa, Homo sapiens
DTGILDSIGRF

SEQ ID NO: 761 - protein, 14 aa, Homo sapiens
DVASVQQQRQEQSY

SEQ ID NO: 762 - protein, 15 aa, Homo sapiens
DVGVYRAVTPQGRPD

SEQ ID NO: 763 - protein, 10 aa, Homo sapiens
DVIGDLHQCQ

SEQ ID NO: 764 - protein, 9 aa, Homo sapiens
DVIRLIMQY

SEQ ID NO: 765 - protein, 12 aa, Homo sapiens
EIIEETKVEDEK

SEQ ID NO: 766 - protein, 15 aa, Homo sapiens
EIIVTHFPFDEQNCS

SEQ ID NO: 767 - protein, 10 aa, Homo sapiens
ELINNELSHF

SEQ ID NO: 768 - protein, 17 aa, Homo sapiens
EPGEPEFKYIGNMHGNE

SEQ ID NO: 769 - protein, 15 aa, Homo sapiens
EPNAIVSDGKYHVVR

SEQ ID NO: 770 - protein, 10 aa, Homo sapiens
ERIAGLEQED

SEQ ID NO: 771 - protein, 11 aa, Homo sapiens
ERTAKELDTNT

SEQ ID NO: 772 - protein, 15 aa, Homo sapiens
ESNAIINDGKYHVVR

SEQ ID NO: 773 - protein, 11 aa, Homo sapiens
ETDLLDIRSEY

SEQ ID NO: 774 - protein, 10 aa, Homo sapiens
EVGGEALGRL

SEQ ID NO: 775 - protein, 9 aa, Homo sapiens
FGESLPARF

SEQ ID NO: 776 - protein, 10 aa, Homo sapiens
FGYSNRVVDL

SEQ ID NO: 777 - protein, 13 aa, Homo sapiens
FITADHLIEKLRT

SEQ ID NO: 778 - protein, 12 aa, Homo sapiens
FLGVAYGATRYN

SEQ ID NO: 779 - protein, 14 aa, Homo sapiens
FLSFPTTKTYFPHF

SEQ ID NO: 780 - protein, 12 aa, Homo sapiens
FRDGDILGKYVD

SEQ ID NO: 781 - protein, 11 aa, Homo sapiens
FRDQEGQDVLL

SEQ ID NO: 782 - protein, 10 aa, Homo sapiens
FRELNEALEL

SEQ ID NO: 783 - protein, 12 aa, Homo sapiens
FRIDSVSEGNAG

SEQ ID NO: 784 - protein, 13 aa, Homo sapiens
FSETGAGKHVPRA

SEQ ID NO: 785 - protein, 15 aa, Homo sapiens
FSETGAGKHVPRAVF

SEQ ID NO: 786 - protein, 10 aa, Homo sapiens
FSQFGPIERA

SEQ ID NO: 787 - protein, 10 aa, Homo sapiens
FSVATVQTTW

SEQ ID NO: 788 - protein, 12 aa, Homo sapiens
FTPAVHASLDKF

SEQ ID NO: 789 - protein, 8 aa, Homo sapiens
FTRSLFVN

SEQ ID NO: 790 - protein, 9 aa, Homo sapiens
FVNDIFERI

SEQ ID NO: 791 - protein, 8 aa, Homo sapiens
FVQMMTAK

SEQ ID NO: 792 - protein, 14 aa, Homo sapiens
GHLYREDQTSPAPG

SEQ ID NO: 793 - protein, 16 aa, Homo sapiens
GKVNVDEVGGEALGRL

SEQ ID NO: 794 - protein, 17 aa, Homo sapiens
GKVNVDEVGGEALGRLL

SEQ ID NO: 795 - protein, 14 aa, Homo sapiens
GNRIAQWQSFQLEG

SEQ ID NO: 796 - protein, 10 aa, Homo sapiens
GRTLQNTMVN

SEQ ID NO: 797 - protein, 12 aa, Homo sapiens
GRTTGIVMDSGD

SEQ ID NO: 798 - protein, 9 aa, Homo sapiens
GTADVHFER

SEQ ID NO: 799 - protein, 9 aa, Homo sapiens
GTFGGLGSK

SEQ ID NO: 800 - protein, 9 aa, Homo sapiens
GTINIVHPK

SEQ ID NO: 801 - protein, 10 aa, Homo sapiens
GVIDVITKTW

SEQ ID NO: 802 - protein, 17 aa, Homo sapiens
GWSSHPPPSPCREQEIR

SEQ ID NO: 803 - protein, 15 aa, Homo sapiens
HGSKYLATASTMDHA

SEQ ID NO: 804 - protein, 9 aa, Homo sapiens
HIILVLSGK

SEQ ID NO: 805 - protein, 9 aa, Homo sapiens
HSERHVLLY

SEQ ID NO: 806 - protein, 9 aa, Homo sapiens
IFANAHTYH

SEQ ID NO: 807 - protein, 8 aa, Homo sapiens
IFEKSFVN

SEQ ID NO: 808 - protein, 11 aa, Homo sapiens
IIEETKVEDEK

SEQ ID NO: 809 - protein, 9 aa, Homo sapiens
IIYKGGTSR

SEQ ID NO: 810 - protein, 9 aa, Homo sapiens
IPMGKSMLV

SEQ ID NO: 811 - protein, 10 aa, Homo sapiens
IPNKNRAEQL

SEQ ID NO: 812 - protein, 13 aa, Homo sapiens
IREADIDGDGQVN

SEQ ID NO: 813 - protein, 12 aa, Homo sapiens
IRETSLDTKSVS

SEQ ID NO: 814 - protein, 12 aa, Homo sapiens
ISKLSAKFGGQA

SEQ ID NO: 815 - protein, 16 aa, Homo sapiens
ISKQEYDESGPSIVHR

SEQ ID NO: 816 - protein, 17 aa, Homo sapiens
ISKQEYDESGPSIVHRK

SEQ ID NO: 817 - protein, 17 aa, Homo sapiens
ISWYDNEFGYSNRVVDL

SEQ ID NO: 818 - protein, 13 aa, Homo sapiens
ITANATEPQKAEN

SEQ ID NO: 819 - protein, 12 aa, Homo sapiens
ITQNGDYQLRTQ

SEQ ID NO: 820 - protein, 14 aa, Homo sapiens
ITSIVKDSSAARNG

SEQ ID NO: 821 - protein, 9 aa, Homo sapiens
IVAGTLTNK

SEQ ID NO: 822 - protein, 16 aa, Homo sapiens
IVTPRTPPPSQGKGRG

SEQ ID NO: 823 - protein, 18 aa, Homo sapiens
IVTPRTPPPSQGKGRGLS

SEQ ID NO: 824 - protein, 11 aa, Homo sapiens
IVVYPVHGFMY

SEQ ID NO: 825 - protein, 9 aa, Homo sapiens
KIADRFLLY

SEQ ID NO: 826 - protein, 15 aa, Homo sapiens
KIWRPDLVLYNNADG

SEQ ID NO: 827 - protein, 10 aa, Homo sapiens
KPRDVSSVEL

SEQ ID NO: 828 - protein, 11 aa, Homo sapiens
KPTISVKEAFY

SEQ ID NO: 829 - protein, 17 aa, Homo sapiens
KSAIEGIKYIAETMKSD

SEQ ID NO: 830 - protein, 9 aa, Homo sapiens
KTYGEIFEK

SEQ ID NO: 831 - protein, 14 aa, Homo sapiens
KVKKIYLDEKRLLA

SEQ ID NO: 832 - protein, 15 aa, Homo sapiens
KVKKIYLDEKRLLAG

SEQ ID NO: 833 - protein, 16 aa, Homo sapiens
KVKKIYLDEKRLLAGD

SEQ ID NO: 834 - protein, 13 aa, Homo sapiens
KVVPEMTEILKKK

SEQ ID NO: 835 - protein, 11 aa, Homo sapiens
KVYNEAGVTFT

SEQ ID NO: 836 - protein, 12 aa, Homo sapiens
KYLPGPLQDMFK

SEQ ID NO: 837 - protein, 11 aa, Homo sapiens
LASGVHGLPLL

SEQ ID NO: 838 - protein, 12 aa, Homo sapiens
LASVSTVLTSKY

SEQ ID NO: 839 - protein, 13 aa, Homo sapiens
LDFLKAVDTNRAS

SEQ ID NO: 840 - protein, 11 aa, Homo sapiens
LDTHPLPLVEV

SEQ ID NO: 841 - protein, 15 aa, Homo sapiens
LERIQIQEAAKKKPG

SEQ ID NO: 842 - protein, 9 aa, Homo sapiens
LFALTLPIW

SEQ ID NO: 843 - protein, 11 aa, Homo sapiens
LGSVAGIFNYY

SEQ ID NO: 844 - protein, 10 aa, Homo sapiens
LGVLESDLPS

SEQ ID NO: 845 - protein, 12 aa, Homo sapiens
LILPEAVGGTVF

SEQ ID NO: 846 - protein, 10 aa, Homo sapiens
LLPPPPPVAR

SEQ ID NO: 847 - protein, 13 aa, Homo sapiens
LLVIVELIPSTSS

SEQ ID NO: 848 - protein, 14 aa, Homo sapiens
LLVPTKARFPAFEL

SEQ ID NO: 849 - protein, 13 aa, Homo sapiens
LNETGDEPFQYKN

SEQ ID NO: 850 - protein, 14 aa, Homo sapiens
LNTILPDARDPAFK

SEQ ID NO: 851 - protein, 11 aa, Homo sapiens
LRPIQALGTEY

SEQ ID NO: 852 - protein, 14 aa, Homo sapiens
LSALEEYTKKLNTQ

SEQ ID NO: 853 - protein, 13 aa, Homo sapiens
LSFPTTKTYFPHF

SEQ ID NO: 854 - protein, 9 aa, Homo sapiens
LTDRELEEY

SEQ ID NO: 855 - protein, 9 aa, Homo sapiens
LVEAKQYII

SEQ ID NO: 856 - protein, 10 aa, Homo sapiens
LVSASQDGKL

SEQ ID NO: 857 - protein, 10 aa, Homo sapiens
LVVYFFRVRN

SEQ ID NO: 858 - protein, 10 aa, Homo sapiens
MLSNPDLMRQ

SEQ ID NO: 859 - protein, 9 aa, Homo sapiens
MPILGLGTW

SEQ ID NO: 860 - protein, 15 aa, Homo sapiens
MSILGMTPGFGDKTF

SEQ ID NO: 861 - protein, 10 aa, Homo sapiens
MSLKQTPLSR

SEQ ID NO: 862 - protein, 10 aa, Homo sapiens
NEIEDTFRQF

SEQ ID NO: 863 - protein, 12 aa, Homo sapiens
NETGDEPFQYKN

SEQ ID NO: 864 - protein, 15 aa, Homo sapiens
NQELRADGTVNQIEG

SEQ ID NO: 865 - protein, 10 aa, Homo sapiens
NRITIPVQTF

SEQ ID NO: 866 - protein, 8 aa, Homo sapiens
NTDSPLRY

SEQ ID NO: 867 - protein, 9 aa, Homo sapiens
NTEEEGLKY

SEQ ID NO: 868 - protein, 18 aa, Homo sapiens
NWVRKVFIDTIPNIMFFS

SEQ ID NO: 869 - protein, 11 aa, Homo sapiens
PEVLNRALSNL

SEQ ID NO: 870 - protein, 11 aa, Homo sapiens
PKFEVIEKPQA

SEQ ID NO: 871 - protein, 15 aa, Homo sapiens
PQRFVVIQNEDLGPA

SEQ ID NO: 872 - protein, 11 aa, Homo sapiens
PSIHIWDTETI

SEQ ID NO: 873 - protein, 13 aa, Homo sapiens
PVDLSKWSGPLSL

SEQ ID NO: 874 - protein, 14 aa, Homo sapiens
QEELPSLWNSRVGF

SEQ ID NO: 875 - protein, 11 aa, Homo sapiens
QIRETSLDTKS

SEQ ID NO: 876 - protein, 9 aa, Homo sapiens
QLYMIQKKS

SEQ ID NO: 877 - protein, 9 aa, Homo sapiens
QLYWSHPRK

SEQ ID NO: 878 - protein, 11 aa, Homo sapiens
QSMDSKLSGRY

SEQ ID NO: 879 - protein, 19 aa, Homo sapiens
QTPQHPSFLFQDKRVSWSL

SEQ ID NO: 880 - protein, 10 aa, Homo sapiens
QVADVVVSRW

SEQ ID NO: 881 - protein, 10 aa, Homo sapiens
QVLGVVARAA

SEQ ID NO: 882 - protein, 9 aa, Homo sapiens
RAIEQLAMM

SEQ ID NO: 883 - protein, 10 aa, Homo sapiens
RHGSKYLATA

SEQ ID NO: 884 - protein, 18 aa, Homo sapiens
RHGSKYLATASTMDHARH

SEQ ID NO: 885 - protein, 10 aa, Homo sapiens
RLYPWGVVEV

SEQ ID NO: 886 - protein, 10 aa, Homo sapiens
RQQPPDLVEF

SEQ ID NO: 887 - protein, 11 aa, Homo sapiens
SCGDLHSVMLE

SEQ ID NO: 888 - protein, 15 aa, Homo sapiens
SEHETRLVAKLFKDY

SEQ ID NO: 889 - protein, 11 aa, Homo sapiens
SGCDLEEIPLD

SEQ ID NO: 890 - protein, 14 aa, Homo sapiens
SHGRTQDENPVVHF

SEQ ID NO: 891 - protein, 10 aa, Homo sapiens
SHPPVEGSYA

SEQ ID NO: 892 - protein, 9 aa, Homo sapiens
SIFKQPVTK

SEQ ID NO: 893 - protein, 9 aa, Homo sapiens
SITSVFITK

SEQ ID NO: 894 - protein, 14 aa, Homo sapiens
SNAIINDGKYHVVR

SEQ ID NO: 895 - protein, 12 aa, Homo sapiens
SSKFQVDNNNRL

SEQ ID NO: 896 - protein, 10 aa, Homo sapiens
STDPSVLGKY

SEQ ID NO: 897 - protein, 9 aa, Homo sapiens
STIEYVIQR

SEQ ID NO: 898 - protein, 11 aa, Homo sapiens
STIGPEGVHQK

SEQ ID NO: 899 - protein, 12 aa, Homo sapiens
SVAALSCLMLVA

SEQ ID NO: 900 - protein, 10 aa, Homo sapiens
SVFQQGMKNK

SEQ ID NO: 901 - protein, 11 aa, Homo sapiens
SVPEFPLSPPK

SEQ ID NO: 902 - protein, 9 aa, Homo sapiens
SVSPVVHVR

SEQ ID NO: 903 - protein, 8 aa, Homo sapiens
TAIRHHVL

SEQ ID NO: 904 - protein, 10 aa, Homo sapiens
TGILDSIGRF

SEQ ID NO: 905 - protein, 11 aa, Homo sapiens
TIIDLPGITRV

SEQ ID NO: 906 - protein, 10 aa, Homo sapiens
TIQKSSLDQL

SEQ ID NO: 907 - protein, 9 aa, Homo sapiens
TLLGDFIYW

SEQ ID NO: 908 - protein, 10 aa, Homo sapiens
TMDHARHGFL

SEQ ID NO: 909 - protein, 16 aa, Homo sapiens
TNVPRASVPDGFLSEL

SEQ ID NO: 910 - protein, 14 aa, Homo sapiens
TPDAMKAAMALEKK

SEQ ID NO: 911 - protein, 16 aa, Homo sapiens
TSPAKQQAPPVRNLHQ

SEQ ID NO: 912 - protein, 10 aa, Homo sapiens
TTGILSILFY

SEQ ID NO: 913 - protein, 15 aa, Homo sapiens
TTMEKAGAHLQGGAK

SEQ ID NO: 914 - protein, 9 aa, Homo sapiens
TTYNYAVLK

SEQ ID NO: 915 - protein, 8 aa, Homo sapiens
TVFSTHFM

SEQ ID NO: 916 - protein, 12 aa, Homo sapiens
VDLEPTVIDEVR

SEQ ID NO: 917 - protein, 13 aa, Homo sapiens
VDPENFRLLGNVL

SEQ ID NO: 918 - protein, 12 aa, Homo sapiens
VDWIILQCAEDI

SEQ ID NO: 919 - protein, 12 aa, Homo sapiens
VEESKDAGIRTL

SEQ ID NO: 920 - protein, 10 aa, Homo sapiens
VGGEALGRLL

SEQ ID NO: 921 - protein, 13 aa, Homo sapiens
VHLKNASRGSAGN

SEQ ID NO: 922 - protein, 12 aa, Homo sapiens
VHLTPEEKSAVT

SEQ ID NO: 923 - protein, 31 aa, Homo sapiens
VHLTPEEKSAVTALWGKVNVDEVGGEALGRL

SEQ ID NO: 924 - protein, 10 aa, Homo sapiens
VIRLLLASGA

SEQ ID NO: 925 - protein, 9 aa, Homo sapiens
VLGDLFVRD

SEQ ID NO: 926 - protein, 11 aa, Homo sapiens
VLSPADKTNVK

SEQ ID NO: 927 - protein, 25 aa, Homo sapiens
VLSPADKTNVKAAWGKVGAHAGEYG

SEQ ID NO: 928 - protein, 31 aa, Homo sapiens
VLSPADKTNVKAAWGKVGAHAGEYGAEALER

SEQ ID NO: 929 - protein, 7 aa, Homo sapiens
VQMMTAK

SEQ ID NO: 930 - protein, 15 aa, Homo sapiens
VSHFFRELAEEKREG

SEQ ID NO: 931 - protein, 10 aa, Homo sapiens
VTASKAIIEK

SEQ ID NO: 932 - protein, 9 aa, Homo sapiens
VTMTASRML

SEQ ID NO: 933 - protein, 9 aa, Homo sapiens
VTNPDTGRY

SEQ ID NO: 934 - protein, 16 aa, Homo sapiens
VTPRTPPPSQGKGRGL

SEQ ID NO: 935 - protein, 9 aa, Homo sapiens
VTSPIRASY

SEQ ID NO: 936 - protein, 12 aa, Homo sapiens
VTVFPIGIGDRY

SEQ ID NO: 937 - protein, 14 aa, Homo sapiens
VVAGVANALAHKYH

SEQ ID NO: 938 - protein, 11 aa, Homo sapiens
VVIRGNSIIML

SEQ ID NO: 939 - protein, 11 aa, Homo sapiens
VVYPSSSQESE

SEQ ID NO: 940 - protein, 8 aa, Homo sapiens
VYRVNSYW

SEQ ID NO: 941 - protein, 17 aa, Homo sapiens
WISKQEYDESGPSIVHR

SEQ ID NO: 942 - protein, 18 aa, Homo sapiens
WISKQEYDESGPSIVHRK

SEQ ID NO: 943 - protein, 20 aa, Homo sapiens
WISKQEYDESGPSIVHRKCF

SEQ ID NO: 944 - protein, 10 aa, Homo sapiens
WSTVLSTYHF

SEQ ID NO: 945 - protein, 11 aa, Homo sapiens
WTTGTISSQRF

SEQ ID NO: 946 - protein, 13 aa, Homo sapiens
WVPYINGKFKKDN

SEQ ID NO: 947 - protein, 15 aa, Homo sapiens
WVSQRTATAGTASPP

SEQ ID NO: 948 - protein, 11 aa, Homo sapiens
YAVAVVKKDSG

SEQ ID NO: 949 - protein, 11 aa, Homo sapiens
YDESGPSIVHR

SEQ ID NO: 950 - protein, 12 aa, Homo sapiens
YDESGPSIVHRK

SEQ ID NO: 951 - protein, 14 aa, Homo sapiens
YDNEFGYSNRVVDL

SEQ ID NO: 952 - protein, 11 aa, Homo sapiens
YEMPSEEGYQD

SEQ ID NO: 953 - protein, 8 aa, Homo sapiens
YEVSQLKD

SEQ ID NO: 954 - protein, 8 aa, Homo sapiens
YGMPRQIL

SEQ ID NO: 955 - protein, 9 aa, Homo sapiens
YIDEQFERY

SEQ ID NO: 956 - protein, 10 aa, Homo sapiens
YIKEDEALPS

SEQ ID NO: 957 - protein, 9 aa, Homo sapiens
YLLLLLLLS

SEQ ID NO: 958 - protein, 13 aa, Homo sapiens
YQKVVAGVANALA

SEQ ID NO: 959 - protein, 17 aa, Homo sapiens
YQKVVAGVANALAHKYH

SEQ ID NO: 960 - protein, 10 aa, Homo sapiens
YTDVPFHNQY

SEQ ID NO: 961 - protein, 11 aa, Homo sapiens
YTERDASGMLY

SEQ ID NO: 962 - protein, 9 aa, Homo sapiens
APAHAITLT

SEQ ID NO: 963 - protein, 9 aa, Human alphaherpesvirus sp.
ATLKPATFL

SEQ ID NO: 964 - protein, 9 aa, Human alphaherpesvirus sp.
ATLNPATFL

SEQ ID NO: 965 - protein, 9 aa, Homo sapiens
CPRQRSSRA

SEQ ID NO: 966 - protein, 9 aa, Human alphaherpesvirus sp.
DPLNPTSQL

SEQ ID NO: 967 - protein, 9 aa, Human alphaherpesvirus sp.
FPYQRKYPL

SEQ ID NO: 968 - protein, 9 aa, Homo sapiens
GPARVPVPF

SEQ ID NO: 969 - protein, 9 aa, Human alphaherpesvirus sp.
GPCFLWLKL

SEQ ID NO: 970 - protein, 9 aa, Human alphaherpesvirus sp.
IPEEAEWFT

SEQ ID NO: 971 - protein, 9 aa, Human alphaherpesvirus sp.
IPFLGIRET

SEQ ID NO: 972 - protein, 9 aa, Homo sapiens
IPPKAKTPL

SEQ ID NO: 973 - protein, 9 aa, Homo sapiens
IPRLCPLQA

SEQ ID NO: 974 - protein, 12 aa, Human alphaherpesvirus sp.
IPVRPDSQFLFA

SEQ ID NO: 975 - protein, 12 aa, Homo sapiens
KEENPTAFLDRL

SEQ ID NO: 976 - protein, 9 aa, Human alphaherpesvirus sp.
KPNGQWRLV

SEQ ID NO: 977 - protein, 9 aa, Human alphaherpesvirus sp.
KPPPCPCPL

SEQ ID NO: 978 - protein, 9 aa, Human alphaherpesvirus sp.
KVSKPKARL

SEQ ID NO: 979 - protein, 9 aa, Human alphaherpesvirus sp.
LPLGSEQNL

SEQ ID NO: 980 - protein, 9 aa, Human alphaherpesvirus sp.
LPTGQDFSL

SEQ ID NO: 981 - protein, 14 aa, Human alphaherpesvirus sp.
MPESPTPLLGRDIL

SEQ ID NO: 982 - protein, 11 aa, Human alphaherpesvirus sp.
MPSPSEPRVCL

SEQ ID NO: 983 - protein, 9 aa, Homo sapiens
NPDGYIDVL

SEQ ID NO: 984 - protein, 12 aa, Human alphaherpesvirus sp.
NPHTPGTSTQLA

SEQ ID NO: 985 - protein, 9 aa, Human alphaherpesvirus sp.
NPRSENTRL

SEQ ID NO: 986 - protein, 15 aa, Human alphaherpesvirus sp.
PPPYPSVPSPTPSST

SEQ ID NO: 987 - protein, 9 aa, Homo sapiens
QPLSCDWGT

SEQ ID NO: 988 - protein, 9 aa, Human alphaherpesvirus sp.
RPAADFHPF

SEQ ID NO: 989 - protein, 11 aa, Human alphaherpesvirus sp.
RPLPLPIGLKA

SEQ ID NO: 990 - protein, 9 aa, Homo sapiens
SPDSIEGQL

SEQ ID NO: 991 - protein, 9 aa, Human alphaherpesvirus sp.
SPHLFGQAL

SEQ ID NO: 992 - protein, 9 aa, Human alphaherpesvirus sp.
TPIARPLYT

SEQ ID NO: 993 - protein, 9 aa, Homo sapiens
TPNERSAAV

SEQ ID NO: 994 - protein, 9 aa, Homo sapiens
VPCLRKELI

SEQ ID NO: 995 - protein, 9 aa, Human alphaherpesvirus sp.
VPPEAKMPL

SEQ ID NO: 996 - protein, 9 aa, Human alphaherpesvirus sp.
WPHCLWVMA

SEQ ID NO: 997 - protein, 11 aa, Human alphaherpesvirus sp.
YPAVSSPYTLL

SEQ ID NO: 998 - protein, 21 aa, Human alphaherpesvirus sp.
PPPPSSPTHDPPDSDPQIPPP

SEQ ID NO: 999 - protein, 21 aa, Homo sapiens
PTRAPSGPRPPSRSQAQTPPR

SEQ ID NO: 1000 - protein, 12 aa, Homo sapiens
ALTIYEMLQNIF

SEQ ID NO: 1001 - protein, 12 aa, Homo sapiens
CAWTIVRVEILR

SEQ ID NO: 1002 - protein, 12 aa, Homo sapiens
CLKDRMNFDIPE

SEQ ID NO: 1003 - protein, 15 aa, Helicobacter pylori
EEFIFHFIKNTRDGL

SEQ ID NO: 1004 - protein, 12 aa, Homo sapiens
EMLQNIFAIFRQ

SEQ ID NO: 1005 - protein, 12 aa, Homo sapiens
ETIVENLLANVY

SEQ ID NO: 1006 - protein, 12 aa, Homo sapiens
FTRGKLMSSLHL

SEQ ID NO: 1007 - protein, 12 aa, Homo sapiens
GRLEYCLKDRMN

SEQ ID NO: 1008 - protein, 12 aa, Homo sapiens
HLKRYYGRILHY

SEQ ID NO: 1009 - protein, 12 aa, Homo sapiens
HYLKAKEYSHCA

SEQ ID NO: 1010 - protein, 12 aa, Homo sapiens
KEYSHCAWTIVR

SEQ ID NO: 1011 - protein, 12 aa, Homo sapiens
LEKEDFTRGKLM

SEQ ID NO: 1012 - protein, 12 aa, Homo sapiens
LGFLQRSSNFQC

SEQ ID NO: 1013 - protein, 12 aa, Homo sapiens
LMSSLHLKRYYG

SEQ ID NO: 1014 - protein, 12 aa, Homo sapiens
LRNFYFINRLTG

SEQ ID NO: 1015 - protein, 12 aa, Homo sapiens
LWQLNGRLEYCL

SEQ ID NO: 1016 - protein, 12 aa, Homo sapiens
MNFDIPEEIKQL

SEQ ID NO: 1017 - protein, 12 aa, Homo sapiens
MSYNLLGFLQRS

SEQ ID NO: 1018 - protein, 12 aa, Homo sapiens
NHLKTVLEEKLE

SEQ ID NO: 1019 - protein, 12 aa, Homo sapiens
NLLANVYHQINH

SEQ ID NO: 1020 - protein, 12 aa, Homo sapiens
PEEIKQLQQFQK

SEQ ID NO: 1021 - protein, 12 aa, Homo sapiens
QCQKLLWQLNGR

SEQ ID NO: 1022 - protein, 12 aa, Homo sapiens
QKEDAALTIYEM

SEQ ID NO: 1023 - protein, 12 aa, Homo sapiens
QLQQFQKEDAAL

SEQ ID NO: 1024 - protein, 12 aa, Homo sapiens
RQDSSSTGWNET

SEQ ID NO: 1025 - protein, 12 aa, Homo sapiens
RSSNFQCQKLLW

SEQ ID NO: 1026 - protein, 12 aa, Homo sapiens
STGWNETIVENL

SEQ ID NO: 1027 - protein, 12 aa, Homo sapiens
VLEEKLEKEDFT

SEQ ID NO: 1028 - protein, 12 aa, Homo sapiens
VRVEILRNFYFI

SEQ ID NO: 1029 - protein, 12 aa, Homo sapiens
VYHQINHLKTVL

SEQ ID NO: 1030 - protein, 12 aa, Homo sapiens
YFINRLTGYLRN

SEQ ID NO: 1031 - protein, 12 aa, Homo sapiens
YGRILHYLKAKE

SEQ ID NO: 1032 - skipped

SEQ ID NO: 1033 - protein, 10 aa, unidentified
  REGION 1..10: note = epitope involved in multiple sclerosis
LIMFKNVVIK

SEQ ID NO: 1034 - protein, 11 aa, unidentified
  REGION 1..11: note = epitope involved in multiple sclerosis
VIIFFKNVVIK

SEQ ID NO: 1035 - protein, 11 aa, Homo sapiens
VVHFFKNIVTP

SEQ ID NO: 1036 - protein, 11 aa, unidentified
  REGION 1..11: note = epitope involved in multiple sclerosis
VVHFFKNVVIK

SEQ ID NO: 1037 - protein, 11 aa, unidentified
  REGION 1..11: note = epitope involved in multiple sclerosis
VVHFFKNVVIP

SEQ ID NO: 1038 - protein, 11 aa, unidentified
  REGION 1..11: note = epitope involved in multiple sclerosis
VVHFFKNVVTP

SEQ ID NO: 1039 - skipped

SEQ ID NO: 1040 - protein, 11 aa, unidentified
  REGION 1..11: note = epitope involved in multiple sclerosis
VVIFFKNVVIK

SEQ ID NO: 1041 - protein, 7 aa, unidentified
  REGION 1..7: note = epitope involved in multiple sclerosis
ERPNHTV

SEQ ID NO: 1042 - protein, 5 aa, unidentified
  REGION 1..5: note = epitope involved in multiple sclerosis
RPNHT

SEQ ID NO: 1043 - protein, 21 aa, unidentified
  REGION 1..21: note = epitope involved in multiple sclerosis
TPRVERGNHTVFLAPYGWMVK

SEQ ID NO: 1044 - protein, 21 aa, unidentified
  REGION 1..21: note = epitope involved in multiple sclerosis
TPRVERNGHSVFLAPYGWMVK

SEQ ID NO: 1045 - protein, 21 aa, unidentified
  REGION 1..21: note = epitope involved in multiple sclerosis
TPRVERPNHTVFLAPYGWMVK

SEQ ID NO: 1046 - protein, 19 aa, Homo sapiens
ADDLKKLKPGLEKDFLPLY

SEQ ID NO: 1047 - protein, 19 aa, Homo sapiens
AVQTGLDLLEILRQEKGGS

SEQ ID NO: 1048 - protein, 19 aa, Homo sapiens
DNLPRGSRAHITLGCAADV

SEQ ID NO: 1049 - protein, 21 aa, Homo sapiens
DQYQYQVVLVEPKTAWRLDCA

SEQ ID NO: 1050 - protein, 18 aa, Homo sapiens
DTVATLLECKTLFILRGL

SEQ ID NO: 1051 - protein, 34 aa, Homo sapiens
DVLKKSYSKAFTLTISALFVTPKTTGARVELSEQ

SEQ ID NO: 1052 - protein, 19 aa, Homo sapiens
EELGNHKAFKKELRQFVPG

SEQ ID NO: 1053 - protein, 18 aa, Homo sapiens
ELQFPFLQDEDTVATLLE

SEQ ID NO: 1054 - protein, 18 aa, Homo sapiens
ELSEQQLQLWPSDVDKLS

SEQ ID NO: 1055 - protein, 19 aa, Homo sapiens
EPREKMDLVTYFGKRPPGV

SEQ ID NO: 1056 - protein, 39 aa, Homo sapiens
FPFLQDEDTVATLLECKTLFILRGLPGSGKSTLARVIVD

SEQ ID NO: 1057 - protein, 19 aa, Homo sapiens
GARGAFSEEYKRLDEDLAA

SEQ ID NO: 1058 - protein, 19 aa, Homo sapiens
GEEVGELSRGKLYSLGNGR

SEQ ID NO: 1059 - protein, 21 aa, Homo sapiens
GKPVPTQGSRKGGALQSCTII

SEQ ID NO: 1060 - protein, 19 aa, Homo sapiens
GWFLTKKSSETLRKAGQVF

SEQ ID NO: 1061 - protein, 19 aa, Homo sapiens
HCTTKFCDYGKAPGAEEYA

SEQ ID NO: 1062 - protein, 19 aa, Homo sapiens
ILRQEKGGSRGEEVGELSR

SEQ ID NO: 1063 - protein, 19 aa, Homo sapiens
ITLGCAADVEAVQTGLDLL

SEQ ID NO: 1064 - protein, 20 aa, Homo sapiens
KAFTLTISALFVTPKTTGAR

SEQ ID NO: 1065 - protein, 19 aa, Homo sapiens
KAPGAEEYAQQDVLKKSYS

SEQ ID NO: 1066 - protein, 19 aa, Mus musculus
KEKRQFVPGDEPREKMDLV

SEQ ID NO: 1067 - protein, 32 aa, Homo sapiens
KKLKPGLEKDFLPLYFGWFLTKKSSETLRKAG

SEQ ID NO: 1068 - protein, 19 aa, Homo sapiens
KLYSLGNGRWMLTLAKNME

SEQ ID NO: 1069 - protein, 19 aa, Homo sapiens
KRLDEDLAAYCRRRDIRIL

SEQ ID NO: 1070 - protein, 19 aa, Homo sapiens
KTAWRLDCAQLKEKNQWQL

SEQ ID NO: 1071 - protein, 19 aa, Homo sapiens
LDDTNHERERLEQLFEMAD

SEQ ID NO: 1072 - protein, 19 aa, Homo sapiens
LEKDFLPLYFGWFLTKKSS

SEQ ID NO: 1073 - protein, 18 aa, Mus musculus
LEQLFEMADQYQQVVLVE

SEQ ID NO: 1074 - protein, 18 aa, Homo sapiens
LKEKNQWQLSADDLKKLK

SEQ ID NO: 1075 - protein, 19 aa, Homo sapiens
MLTLAKNMEVRAIFTGYYG

SEQ ID NO: 1076 - protein, 19 aa, Homo sapiens
MSSSGAKDKPELQFPFLQD

SEQ ID NO: 1077 - protein, 19 aa, Homo sapiens
PSDVDKLSPTDNLPRGSRA

SEQ ID NO: 1078 - protein, 19 aa, Homo sapiens
QDVLKKSYSKAFTLTISAL

SEQ ID NO: 1079 - protein, 19 aa, Homo sapiens
RAIFTGYYGKGKPVPTQGS

SEQ ID NO: 1080 - protein, 18 aa, Homo sapiens
RRRDIRILVLDDTNHERE

SEQ ID NO: 1081 - protein, 19 aa, Homo sapiens
SGKSTLARVIVDKYRDGTK

SEQ ID NO: 1082 - protein, 19 aa, Homo sapiens
TLFILRGLPGSGKSTLARV

SEQ ID NO: 1083 - protein, 19 aa, Homo sapiens
TLRKAGQVFLEELGNHKAF

SEQ ID NO: 1084 - protein, 19 aa, Homo sapiens
VDKYRDGTKMVSADAYKIT

SEQ ID NO: 1085 - protein, 19 aa, Homo sapiens
VSADAYKITPGARGAFSEE

SEQ ID NO: 1086 - protein, 19 aa, Homo sapiens
VTPKTTGARVELSEQQLQL

SEQ ID NO: 1087 - protein, 19 aa, Homo sapiens
YFGKRPPGVLHCTTKFCDY

SEQ ID NO: 1088 - protein, 16 aa, Homo sapiens
AAMELKVEDPFYWVSP

SEQ ID NO: 1089 - protein, 9 aa, Homo sapiens
CLQYRLRGK

SEQ ID NO: 1090 - protein, 16 aa, Homo sapiens
CWKITLFVIVPVLGPL

SEQ ID NO: 1091 - protein, 16 aa, Homo sapiens
DPFYWVSPGVLVLLAV

SEQ ID NO: 1092 - protein, 16 aa, Homo sapiens
DPHFLRVPCWKITLFV

SEQ ID NO: 1093 - protein, 16 aa, Homo sapiens
EGGFTCFFRDHSYQEE

SEQ ID NO: 1094 - protein, 16 aa, Homo sapiens
ELPCRISPGKNATGME

SEQ ID NO: 1095 - protein, 17 aa, Homo sapiens
ENPVVHFFKNIVTPRTP

SEQ ID NO: 1096 - protein, 9 aa, Homo sapiens
FLCLQYRLR

SEQ ID NO: 1097 - protein, 16 aa, Homo sapiens
GDEVELPCRISPGKNA

SEQ ID NO: 1098 - protein, 16 aa, Homo sapiens
GEGKVTLRIRNVRFSD

SEQ ID NO: 1099 - protein, 16 aa, Homo sapiens
GKNATGMEVGWYRPPF

SEQ ID NO: 1100 - protein, 9 aa, Homo sapiens
GLVFLCLQY

SEQ ID NO: 1101 - protein, 16 aa, Homo sapiens
GQFRVIGPRHPIRALV

SEQ ID NO: 1102 - protein, 16 aa, Homo sapiens
GVLVLLAVLPVLLLQI

SEQ ID NO: 1103 - protein, 16 aa, Homo sapiens
HLYRNGKDQDGDQAPE

SEQ ID NO: 1104 - protein, 16 aa, Homo sapiens
HRTFDPHFLRVPCWKI

SEQ ID NO: 1105 - protein, 16 aa, Homo sapiens
ICYNWLHRRLAGQFLE

SEQ ID NO: 1106 - protein, 16 aa, Homo sapiens
IENLHRTFDPHFLRVP

SEQ ID NO: 1107 - protein, 16 aa, Homo sapiens
IRNVRFSDEGGFTCFF

SEQ ID NO: 1108 - protein, 16 aa, Homo sapiens
IVPVLGPLVALIICYN

SEQ ID NO: 1109 - protein, 16 aa, Homo sapiens
KDAIGEGKVTLRIRNV

SEQ ID NO: 1110 - protein, 21 aa, Homo sapiens
KNATGMEVGWYRPPFSRVVHL

SEQ ID NO: 1111 - protein, 21 aa, Homo sapiens
KNATGMEVGWYRPPFSRVVHL

SEQ ID NO: 1112 - protein, 9 aa, Homo sapiens
LCLQYRLRG

SEQ ID NO: 1113 - protein, 16 aa, Homo sapiens
LGPLVALIICYNWLHR

SEQ ID NO: 1114 - protein, 16 aa, Homo sapiens
LKVEDPFYWVSPGVLV

SEQ ID NO: 1115 - protein, 16 aa, Homo sapiens
LLAVLPVLLLQITVGL

SEQ ID NO: 1116 - protein, 16 aa, Homo sapiens
LLQITVGLVFLCLQYR

SEQ ID NO: 1117 - protein, 16 aa, Homo sapiens
LPVLLLQITVGLVFLC

SEQ ID NO: 1118 - protein, 16 aa, Homo sapiens
LQYRLRGKLRAEIENL

SEQ ID NO: 1119 - protein, 16 aa, Homo sapiens
LRAEIENLHRTFDPHF

SEQ ID NO: 1120 - protein, 16 aa, Homo sapiens
LRGKLRAEIENLHRTF

SEQ ID NO: 1121 - protein, 16 aa, Homo sapiens
LRVPCWKITLFVIVPV

SEQ ID NO: 1122 - protein, 9 aa, Homo sapiens
LVFLCLQYR

SEQ ID NO: 1123 - protein, 16 aa, Homo sapiens
NGKDQDGDQAPEYRGR

SEQ ID NO: 1124 - protein, 16 aa, Homo sapiens
QAPEYRGRTELLKDAI

SEQ ID NO: 1125 - protein, 16 aa, Homo sapiens
QDGDQAPEYRGRTELL

SEQ ID NO: 1126 - protein, 9 aa, Homo sapiens
QYRLRGKLR

SEQ ID NO: 1127 - protein, 16 aa, Homo sapiens
RALVGDEVELPCRISP

SEQ ID NO: 1128 - protein, 16 aa, Homo sapiens
RDHSYQEEAAMELKVE

SEQ ID NO: 1129 - protein, 16 aa, Homo sapiens
RFSDEGGFTCFFRDHS

SEQ ID NO: 1130 - protein, 16 aa, Homo sapiens
RHPIRALVGDEVELPC

SEQ ID NO: 1131 - protein, 16 aa, Homo sapiens
RISPGKNATGMEVGWY

SEQ ID NO: 1132 - protein, 14 aa, Homo sapiens
RLAGQFLEELRNPF

SEQ ID NO: 1133 - protein, 9 aa, Homo sapiens
RLRGKLRAE

SEQ ID NO: 1134 - protein, 16 aa, Homo sapiens
RPPFSRVVHLYRNGKD

SEQ ID NO: 1135 - protein, 16 aa, Homo sapiens
SRVVHLYRNGKDQDGD

SEQ ID NO: 1136 - protein, 16 aa, Homo sapiens
TCFFRDHSYQEEAAME

SEQ ID NO: 1137 - protein, 16 aa, Homo sapiens
TELLKDAIGEGKVTLR

SEQ ID NO: 1138 - protein, 16 aa, Homo sapiens
TGMEVGWYRPPFSRVV

SEQ ID NO: 1139 - protein, 16 aa, Homo sapiens
TLFVIVPVLGPLVALI

SEQ ID NO: 1140 - protein, 21 aa, unidentified
  REGION 1..21: note = epitope involved in multiple sclerosis
TPRVERNGHSVFLAPYGWMVK

SEQ ID NO: 1141 - protein, 21 aa, unidentified
  REGION 1..21: note = epitope involved in multiple sclerosis
TPRVERNGHSVFLAPYGWMVK

SEQ ID NO: 1142 - protein, 16 aa, Homo sapiens
TVGLVFLCLQYRLRGK

SEQ ID NO: 1143 - protein, 16 aa, Homo sapiens
VALIICYNWLHRRLAG

SEQ ID NO: 1144 - protein, 9 aa, Homo sapiens
VFLCLQYRL

SEQ ID NO: 1145 - protein, 9 aa, Homo sapiens
VGLVFLCLQ

SEQ ID NO: 1146 - protein, 16 aa, Homo sapiens
VGWYRPPFSRVVHLYR

SEQ ID NO: 1147 - protein, 16 aa, Homo sapiens
VIGPRHPIRALVGDEV

SEQ ID NO: 1148 - protein, 16 aa, Homo sapiens
VTLRIRNVRFSDEGGF

SEQ ID NO: 1149 - protein, 16 aa, Homo sapiens
WLHRRLAGQFLEELRN

SEQ ID NO: 1150 - protein, 16 aa, Homo sapiens
WVSPGVLVLLAVLPVL

SEQ ID NO: 1151 - protein, 16 aa, Homo sapiens
YQEEAAMELKVEDPFY

SEQ ID NO: 1152 - protein, 16 aa, Homo sapiens
YRGRTELLKDAIGEGK

SEQ ID NO: 1153 - protein, 9 aa, Homo sapiens
YRLRGKLRA

SEQ ID NO: 1154 - protein, 21 aa, Human alphaherpesvirus sp.
AGAGGGAGGAGAGGGAGGAGG

SEQ ID NO: 1155 - protein, 28 aa, Human alphaherpesvirus sp.
DGEPDVPPGAIEQGPADDPGEGPSTGPR

SEQ ID NO: 1156 - protein, 22 aa, Human alphaherpesvirus sp.
GGSGGRRGRGRERARGGSRERA

SEQ ID NO: 1157 - protein, 26 aa, Human alphaherpesvirus sp.
GVFVYGGSKTSLYNLRRGTALAIPQC

SEQ ID NO: 1158 - protein, 26 aa, Human alphaherpesvirus sp.
KFENIAEGLRALLARSHVERTTDEGT

SEQ ID NO: 1159 - protein, 27 aa, Human alphaherpesvirus sp.
KKGGWFGKHRGQGGSNPKFENIAEGLR

SEQ ID NO: 1160 - protein, 44 aa, Human alphaherpesvirus sp.
MSDEGPGTGPGNGLGEKGDTSGPEGSGGSGPQRRGGDNHGRGRG

SEQ ID NO: 1161 - protein, 27 aa, Human alphaherpesvirus sp.
PPRRPPPGRRPFFHPVGEADYFEYHQE

SEQ ID NO: 1162 - protein, 28 aa, Human alphaherpesvirus sp.
PRGQGDGGRRKKGGWFGKHRGQGGSNPK

SEQ ID NO: 1163 - protein, 26 aa, Human alphaherpesvirus sp.
QGPADDPGEGPSTGPRGQGDGGRRKK

SEQ ID NO: 1164 - protein, 20 aa, Human alphaherpesvirus sp.
RERARGGSRERARGRGRGRG

SEQ ID NO: 1165 - protein, 149 aa, Human alphaherpesvirus sp.
RKKGGWFGKHRGQGGSNPKFENIAEGLRALLARSHVERTTDEGTWVAGVFVYGGSKTSLYNLRRGTALAIPQCRLTPLSRLPFGMAPGPGPQPGPLRESIVCYFMVFLQTHIFAEVLKDAIKDLVMTKPAPTCNIRVTVCSFDDGVDLP

SEQ ID NO: 1166 - protein, 28 aa, Human alphaherpesvirus sp.
VEGAAAEGDDGDDGDEGGDGDEGEEGQE

SEQ ID NO: 1167 - protein, 20 aa, Homo sapiens
AVIMGNWENHWIYWVGPIIG

SEQ ID NO: 1168 - protein, 20 aa, Homo sapiens
AVLAGGLYEYVFCPDVEFKR

SEQ ID NO: 1169 - protein, 20 aa, Homo sapiens
DLILKPGVVHVIDVDRGEEK

SEQ ID NO: 1170 - protein, 20 aa, Homo sapiens
EDNRSQVETDDLILKPGVVH

SEQ ID NO: 1171 - protein, 20 aa, Homo sapiens
GILYLVTPPSVVGGLGVTMV

SEQ ID NO: 1172 - protein, 20 aa, Homo sapiens
GKCGPLCTRENIMVAFKGVW

SEQ ID NO: 1173 - protein, 20 aa, Homo sapiens
GTEKPLPVDMVLISLCFGLS

SEQ ID NO: 1174 - protein, 20 aa, Homo sapiens
HGNLTAGHGLLVELIITFQL

SEQ ID NO: 1175 - protein, 20 aa, Homo sapiens
HLFAINYTGASMNPARSFGP

SEQ ID NO: 1176 - protein, 20 aa, Homo sapiens
IATMVQCFGHISGGHINPAV

SEQ ID NO: 1177 - protein, 20 aa, Homo sapiens
ISGGHINPAVTVAMVCTRKI

SEQ ID NO: 1178 - protein, 20 aa, Homo sapiens
KRTDVTGSIALAIGFSVAIG

SEQ ID NO: 1179 - protein, 20 aa, Homo sapiens
LSLGSTINWGGTEKPLPVDM

SEQ ID NO: 1180 - protein, 20 aa, Homo sapiens
MSDRPTARRWGKCGPLCTRE

SEQ ID NO: 1181 - protein, 20 aa, Homo sapiens
NIMVAFKGVWTQAFWKAVTA

SEQ ID NO: 1182 - protein, 20 aa, Homo sapiens
QQTKGSYMEVEDNRSQVETD

SEQ ID NO: 1183 - protein, 20 aa, Homo sapiens
RFKEAFSKAAQQTKGSYMEV

SEQ ID NO: 1184 - protein, 20 aa, Homo sapiens
SIAKSVFYIAAQCLGAIIGA

SEQ ID NO: 1185 - protein, 20 aa, Homo sapiens
SMNPARSFGPAVIMGNWENH

SEQ ID NO: 1186 - protein, 20 aa, Homo sapiens
TQAFWKAVTAEFLAMLIFVL

SEQ ID NO: 1187 - protein, 20 aa, Homo sapiens
TVAMVCTRKISIAKSVFYIA

SEQ ID NO: 1188 - protein, 20 aa, Homo sapiens
VFCPDVEFKRRFKEAFSKAA

SEQ ID NO: 1189 - protein, 20 aa, Homo sapiens
VFTIFASCDSKRTDVTGSIA

SEQ ID NO: 1190 - protein, 20 aa, Homo sapiens
VVGGLGVTMVHGNLTAGHGL

SEQ ID NO: 1191 - protein, 20 aa, Homo sapiens
WIYWVGPIIGAVLAGGLYEY

SEQ ID NO: 1192 - protein, 19 aa, Homo sapiens
NATGMEVGWYRPPFSRVVH

SEQ ID NO: 1193 - protein, 12 aa, Homo sapiens
RALVGDEVELPC

SEQ ID NO: 1194 - protein, 21 aa, unidentified
  REGION 1..21: note = epitope involved in multiple sclerosis
TPRVERFGHSVFLAPYGWMVK

SEQ ID NO: 1195 - protein, 21 aa, unidentified
  REGION 1..21: note = epitope involved in multiple sclerosis
TPRVERGGHSVFLAPYGWMVK

SEQ ID NO: 1196 - protein, 21 aa, unidentified
  REGION 1..21: note = epitope involved in multiple sclerosis
TPRVERQGHSVFLAPYGWMVK

SEQ ID NO: 1197 - protein, 15 aa, Homo sapiens
EKKGKDQSGEVLSSV

SEQ ID NO: 1198 - protein, 24 aa, Homo sapiens
FCPDVEFKRRFKEAFSKAAQQTKG

SEQ ID NO: 1199 - protein, 12 aa, unidentified
  REGION 1..12: note = epitope involved in multiple sclerosis
DPGQLRLWRLAS

SEQ ID NO: 1200 - protein, 12 aa, unidentified
  REGION 1..12: note = epitope involved in multiple sclerosis
FHQPTYDYTVSR

SEQ ID NO: 1201 - protein, 12 aa, unidentified
  REGION 1..12: note = epitope involved in multiple sclerosis
FSKTEPLSPSWF

SEQ ID NO: 1202 - protein, 12 aa, unidentified
  REGION 1..12: note = epitope involved in multiple sclerosis
GTWICDFKSCSW

SEQ ID NO: 1203 - protein, 12 aa, unidentified
  REGION 1..12: note = epitope involved in multiple sclerosis
HIDVSRPWRVTG

SEQ ID NO: 1204 - protein, 12 aa, unidentified
  REGION 1..12: note = epitope involved in multiple sclerosis
HWRHWLADTAFP

SEQ ID NO: 1205 - protein, 12 aa, unidentified
  REGION 1..12: note = epitope involved in multiple sclerosis
HYNPWEQEPMMY

SEQ ID NO: 1206 - protein, 12 aa, unidentified
  REGION 1..12: note = epitope involved in multiple sclerosis
NALTESKYVKLL

SEQ ID NO: 1207 - protein, 12 aa, unidentified
  REGION 1..12: note = epitope involved in multiple sclerosis
NCAFWLGKLYCR

SEQ ID NO: 1208 - protein, 12 aa, Homo sapiens
NCSWCHVLQRCS

SEQ ID NO: 1209 - protein, 10 aa, Prochlorococcus marinus
NCWKPQVLHC

SEQ ID NO: 1210 - protein, 12 aa, unidentified
  REGION 1..12: note = epitope involved in multiple sclerosis
NNLTQSKFLRLQ

SEQ ID NO: 1211 - protein, 12 aa, unidentified
  REGION 1..12: note = epitope involved in multiple sclerosis
NNPAPVYTHRVL

SEQ ID NO: 1212 - protein, 12 aa, unidentified
  REGION 1..12: note = epitope involved in multiple sclerosis
NPVEHWLAVLPT

SEQ ID NO: 1213 - protein, 12 aa, unidentified
  REGION 1..12: note = epitope involved in multiple sclerosis
NYPSWLHAYRLA

SEQ ID NO: 1214 - protein, 12 aa, unidentified
  REGION 1..12: note = epitope involved in multiple sclerosis
QHNVSRPWVLFT

SEQ ID NO: 1215 - protein, 12 aa, unidentified
  REGION 1..12: note = epitope involved in multiple sclerosis
SCNYHGRTLTCW

SEQ ID NO: 1216 - protein, 12 aa, unidentified
  REGION 1..12: note = epitope involved in multiple sclerosis
SCNYHHTYLTCW

SEQ ID NO: 1217 - protein, 12 aa, unidentified
  REGION 1..12: note = epitope involved in multiple sclerosis
SCQLVRTIWSCS

SEQ ID NO: 1218 - protein, 12 aa, unidentified
  REGION 1..12: note = epitope involved in multiple sclerosis
SLGSKMDISRPW

SEQ ID NO: 1219 - protein, 12 aa, unidentified
  REGION 1..12: note = epitope involved in multiple sclerosis
STLSESKVNRLL

SEQ ID NO: 1220 - protein, 12 aa, unidentified
  REGION 1..12: note = epitope involved in multiple sclerosis
TAQDISRPWWFP

SEQ ID NO: 1221 - protein, 12 aa, unidentified
  REGION 1..12: note = epitope involved in multiple sclerosis
TIMDISRTWTKV

SEQ ID NO: 1222 - protein, 12 aa, unidentified
  REGION 1..12: note = epitope involved in multiple sclerosis
TNTLTPHKLQML

SEQ ID NO: 1223 - protein, 12 aa, unidentified
  REGION 1..12: note = epitope involved in multiple sclerosis
TPQQDLYDIMYD

SEQ ID NO: 1224 - protein, 12 aa, unidentified
  REGION 1..12: note = epitope involved in multiple sclerosis
TQGLKYWYPVWS

SEQ ID NO: 1225 - protein, 12 aa, unidentified
  REGION 1..12: note = epitope involved in multiple sclerosis
VPQKYWWLSDHT

SEQ ID NO: 1226 - protein, 12 aa, unidentified
  REGION 1..12: note = epitope involved in multiple sclerosis
VVPKYWWSAELP

SEQ ID NO: 1227 - protein, 12 aa, unidentified
  REGION 1..12: note = epitope involved in multiple sclerosis
WHWRQPTWLQVI

SEQ ID NO: 1228 - protein, 11 aa, Homo sapiens
FFRDHSYQEEA

SEQ ID NO: 1229 - protein, 11 aa, unidentified
  REGION 1..11: note = epitope involved in multiple sclerosis
FFRDHSYQSEA

SEQ ID NO: 1230 - protein, 7 aa, unidentified
  REGION 1..7: note = epitope involved in multiple sclerosis
APAHHPP

SEQ ID NO: 1231 - protein, 7 aa, unidentified
  REGION 1..7: note = epitope involved in multiple sclerosis
APAHQIP

SEQ ID NO: 1232 - protein, 7 aa, unidentified
  REGION 1..7: note = epitope involved in multiple sclerosis
APPHLPP

SEQ ID NO: 1233 - protein, 7 aa, unidentified
  REGION 1..7: note = epitope involved in multiple sclerosis
APPHQMP

SEQ ID NO: 1234 - protein, 7 aa, unidentified
  REGION 1..7: note = epitope involved in multiple sclerosis
APPHVMP

SEQ ID NO: 1235 - protein, 7 aa, unidentified
  REGION 1..7: note = epitope involved in multiple sclerosis
APSHPPP

SEQ ID NO: 1236 - protein, 7 aa, unidentified
  REGION 1..7: note = epitope involved in multiple sclerosis
EFGTFLW

SEQ ID NO: 1237 - protein, 6 aa, unidentified
  REGION 1..6: note = epitope involved in multiple sclerosis
FGTYLW

SEQ ID NO: 1238 - protein, 7 aa, unidentified
  REGION 1..7: note = epitope involved in multiple sclerosis
FHLPWMQ

SEQ ID NO: 1239 - protein, 7 aa, unidentified
  REGION 1..7: note = epitope involved in multiple sclerosis
GPVNMNL

SEQ ID NO: 1240 - protein, 7 aa, unidentified
  REGION 1..7: note = epitope involved in multiple sclerosis
GRQAQYY

SEQ ID NO: 1241 - protein, 11 aa, Human alphaherpesvirus sp.
GRRPFFHPVGE

SEQ ID NO: 1242 - protein, 7 aa, unidentified
  REGION 1..7: note = epitope involved in multiple sclerosis
ILNWHQF

SEQ ID NO: 1243 - protein, 7 aa, unidentified
  REGION 1..7: note = epitope involved in multiple sclerosis
KFGTALW

SEQ ID NO: 1244 - protein, 7 aa, unidentified
  REGION 1..7: note = epitope involved in multiple sclerosis
KWPIIDT

SEQ ID NO: 1245 - protein, 6 aa, unidentified
  REGION 1..6: note = epitope involved in multiple sclerosis
LNWNPF

SEQ ID NO: 1246 - protein, 7 aa, unidentified
  REGION 1..7: note = epitope involved in multiple sclerosis
MFNWHPF

SEQ ID NO: 1247 - protein, 7 aa, unidentified
  REGION 1..7: note = epitope involved in multiple sclerosis
MQAHQTK

SEQ ID NO: 1248 - protein, 7 aa, unidentified
  REGION 1..7: note = epitope involved in multiple sclerosis
PLELSVY

SEQ ID NO: 1249 - protein, 7 aa, unidentified
  REGION 1..7: note = epitope involved in multiple sclerosis
PVELQLY

SEQ ID NO: 1250 - protein, 7 aa, unidentified
  REGION 1..7: note = epitope involved in multiple sclerosis
PVGPWTN

SEQ ID NO: 1251 - protein, 7 aa, unidentified
  REGION 1..7: note = epitope involved in multiple sclerosis
QFGTFLW

SEQ ID NO: 1252 - protein, 8 aa, Homo sapiens
SFDGTFLW

SEQ ID NO: 1253 - protein, 7 aa, unidentified
  REGION 1..7: note = epitope involved in multiple sclerosis
SFGTALW

SEQ ID NO: 1254 - protein, 7 aa, unidentified
  REGION 1..7: note = epitope involved in multiple sclerosis
SFGTFLW

SEQ ID NO: 1255 - protein, 7 aa, unidentified
  REGION 1..7: note = epitope involved in multiple sclerosis
SFGTILW

SEQ ID NO: 1256 - protein, 7 aa, unidentified
  REGION 1..7: note = epitope involved in multiple sclerosis
SHRPTTQ

SEQ ID NO: 1257 - protein, 7 aa, unidentified
  REGION 1..7: note = epitope involved in multiple sclerosis
SQSVAAS

SEQ ID NO: 1258 - protein, 7 aa, unidentified
  REGION 1..7: note = epitope involved in multiple sclerosis
STEGRHN

SEQ ID NO: 1259 - protein, 7 aa, unidentified
  REGION 1..7: note = epitope involved in multiple sclerosis
TVQPQFH

SEQ ID NO: 1260 - protein, 7 aa, unidentified
  REGION 1..7: note = epitope involved in multiple sclerosis
TYMVPAP

SEQ ID NO: 1261 - protein, 8 aa, unidentified
  REGION 1..8: note = epitope involved in multiple sclerosis
VLNRWNPF

SEQ ID NO: 1262 - protein, 7 aa, unidentified
  REGION 1..7: note = epitope involved in multiple sclerosis
VLNWHPF

SEQ ID NO: 1263 - protein, 7 aa, unidentified
  REGION 1..7: note = epitope involved in multiple sclerosis
WGLDNPP

SEQ ID NO: 1264 - protein, 7 aa, unidentified
  REGION 1..7: note = epitope involved in multiple sclerosis
WYYKPPA

SEQ ID NO: 1265 - protein, 9 aa, Human alphaherpesvirus sp.
RPRTPPPSY

SEQ ID NO: 1266 - protein, 8 aa, Homo sapiens
TPRTPPPQ

SEQ ID NO: 1267 - protein, 13 aa, Homo sapiens
FSWGAEGQRPGFG

SEQ ID NO: 1268 - protein, 25 aa, Homo sapiens
SIAFPSKTSASIGSLCADARMYGVL

SEQ ID NO: 1269 - protein, 17 aa, Homo sapiens
SLCFGLSIATMVQCFGH

SEQ ID NO: 1270 - protein, 18 aa, Homo sapiens
VIDVDRGEEKKGKDQSGE

SEQ ID NO: 1271 - protein, 11 aa, Homo sapiens
GDEVELPCRIS

SEQ ID NO: 1272 - protein, 14 aa, Homo sapiens
LTVGLTRRGQPRQY

SEQ ID NO: 1273 - protein, 14 aa, Homo sapiens
LTVGLTRRGQPRQY

SEQ ID NO: 1274 - protein, 13 aa, Homo sapiens
YNQYSQRYHQRTN

SEQ ID NO: 1275 - protein, 13 aa, Homo sapiens
YNQYSQRYHQRTN

SEQ ID NO: 1276 - protein, 21 aa, Homo sapiens
GITVSRNGSSVFTTSQDSTLK

SEQ ID NO: 1277 - protein, 21 aa, unidentified
  REGION 1..21: note = epitope involved in multiple sclerosis
TCFFRDGNYQEEAAMELKVED

SEQ ID NO: 1278 - protein, 19 aa, Homo sapiens
TFRDLGNLTHLFLHGNRIS

SEQ ID NO: 1279 - protein, 21 aa, unidentified
  REGION 1..21: note = epitope involved in multiple sclerosis
TFRVLRNGTSVFLHPNKWTVK

SEQ ID NO: 1280 - protein, 19 aa, Homo sapiens
TLINLTNLTHLYLHNNKFT

SEQ ID NO: 1281 - protein, 21 aa, Homo sapiens
VVHLYRNGKDQDGDQAPEYRG

SEQ ID NO: 1282 - protein, 11 aa, Homo sapiens
ERLGPLVEQGR

SEQ ID NO: 1283 - protein, 15 aa, Homo sapiens
KLTSEARGRIPVAQK

SEQ ID NO: 1284 - protein, 27 aa, Homo sapiens
MKILTERGYSFTTTAEREIVRDIKEKL

SEQ ID NO: 1285 - protein, 15 aa, Homo sapiens
AHYGSLPQKSHGRTQ

SEQ ID NO: 1286 - protein, 15 aa, Homo sapiens
DPVVHFFKNIVTPRT

SEQ ID NO: 1287 - protein, 16 aa, Homo sapiens
GKGRGLSLSRFSWGAE

SEQ ID NO: 1288 - protein, 7 aa, Homo sapiens
GLQLYFS

SEQ ID NO: 1289 - protein, 15 aa, Homo sapiens
GQRPGFGYGGRASDY

SEQ ID NO: 1290 - protein, 15 aa, Homo sapiens
ILDSIGRFFGGDRGA

SEQ ID NO: 1291 - protein, 15 aa, Homo sapiens
PKRGSGKDSHHPART

SEQ ID NO: 1292 - protein, 21 aa, Homo sapiens
YLASASTMDHARHGFLPRRHR

SEQ ID NO: 1293 - protein, 26 aa, Zea mays
FTGASMNPARSFGPALATGDWTNHWV

SEQ ID NO: 1294 - protein, 26 aa, Homo sapiens
YTGASMNPARSFGPAVIMGNWENHWI

SEQ ID NO: 1295 - protein, 20 aa, Triticum aestivum
AMCNVYIPPYCAMAPFGIFG

SEQ ID NO: 1296 - protein, 8 aa, Triticum aestivum
ELPYPQPQ

SEQ ID NO: 1297 - protein, 8 aa, Triticum aestivum
FPQPELPY

SEQ ID NO: 1298 - protein, 10 aa, Triticum aestivum
FPQPQPFPPQ

SEQ ID NO: 1299 - protein, 10 aa, Triticum aestivum
FPQPQQQFPQ

SEQ ID NO: 1300 - protein, 13 aa, Triticum aestivum
FPQQPQQPFPQQP

SEQ ID NO: 1301 - protein, 12 aa, Triticum aestivum
FPQQPQQPYPQQ

SEQ ID NO: 1302 - protein, 13 aa, Triticum aestivum
FPQQPQQPYPQQP

SEQ ID NO: 1303 - protein, 13 aa, Triticum aestivum
FPQQPQQPYPQQP

SEQ ID NO: 1304 - protein, 15 aa, Triticum aestivum
FPQQPQQPYPQQPQQ

SEQ ID NO: 1305 - protein, 10 aa, Triticum aestivum
FPSQQPYLQL

SEQ ID NO: 1306 - protein, 12 aa, unidentified
  REGION 1..12: note = epitope involved in celiac disease
FSQPEQEFPQPQ

SEQ ID NO: 1307 - protein, 12 aa, Triticum aestivum
FSQPQQQFPQPQ

SEQ ID NO: 1308 - protein, 11 aa, unidentified
  REGION 1..11: note = eptiope involved in celiac disease
GIIQPEQPAQL

SEQ ID NO: 1309 - protein, 11 aa, Triticum aestivum
GIIQPQQPAQL

SEQ ID NO: 1310 - protein, 15 aa, Triticum aestivum
GSFQPSQQNPQAQGS

SEQ ID NO: 1311 - protein, 20 aa, Triticum aestivum
HQPQQTFPQPQQTYPHQPQQ

SEQ ID NO: 1312 - protein, 20 aa, Triticum aestivum
IHSVAHSIIMQQEQQQGVPI

SEQ ID NO: 1313 - protein, 10 aa, unidentified
  REGION 1..10: note = epitope involved in celiac disease
IIQPEQPAQL

SEQ ID NO: 1314 - protein, 9 aa, Triticum aestivum
IIQPQQPAQ

SEQ ID NO: 1315 - protein, 10 aa, Triticum aestivum
IIQPQQPAQL

SEQ ID NO: 1316 - protein, 20 aa, Triticum aestivum
LGIIQPQQPAQLEGIRSLVL

SEQ ID NO: 1317 - protein, 12 aa, Triticum aestivum
LGQGSFRPSQQN

SEQ ID NO: 1318 - protein, 17 aa, Triticum aestivum
LGQQQPFPPQQPYPQPQ

SEQ ID NO: 1319 - protein, 19 aa, Triticum aestivum
LGQQQPFPPQQPYPQPQPF

SEQ ID NO: 1320 - protein, 20 aa, unidentified
  REGION 1..20: note = epitope involved in celiac disease
LQLQPFPQPEKPYPQPEKPY

SEQ ID NO: 1321 - protein, 20 aa, unidentified
  REGION 1..20: note = epitope involved in celiac disease
LQLQPFPQPEKPYPQPELPY

SEQ ID NO: 1322 - protein, 20 aa, unidentified
  REGION 1..20: note = epitope involved in celiac disease
LQLQPFPQPEKPYPQPELPY

SEQ ID NO: 1323 - protein, 20 aa, unidentified
  REGION 1..20: note = epitope involved in celiac disease
LQLQPFPQPELPYPQPEKPY

SEQ ID NO: 1324 - protein, 20 aa, unidentified
  REGION 1..20: note = epitope involved in celiac disease
LQLQPFPQPELPYPQPELPY

SEQ ID NO: 1325 - protein, 33 aa, unidentified
  REGION 1..33: note = epitope involved in celiac disease
LQLQPFPQPELPYPQPELPYPQPELPYPQPQPF

SEQ ID NO: 1326 - protein, 13 aa, Triticum aestivum
LQLQPFPQPQLPY

SEQ ID NO: 1327 - protein, 13 aa, Triticum aestivum
LQLQPFPQPQLPY

SEQ ID NO: 1328 - protein, 20 aa, Triticum aestivum
LQLQPFPQPQLPYPQPQLPY

SEQ ID NO: 1329 - protein, 20 aa, Triticum aestivum
LQLQPFPQPQLPYPQPQLPY

SEQ ID NO: 1330 - protein, 32 aa, unidentified
  REGION 1..32: note = epitope involved in celiac disease
LQLQPFPQPQLPYPQPQLPYPQPQLPYPQPPF

SEQ ID NO: 1331 - protein, 33 aa, Triticum aestivum
LQLQPFPQPQLPYPQPQLPYPQPQLPYPQPQPF

SEQ ID NO: 1332 - protein, 8 aa, Triticum aestivum
LQPFPQPE

SEQ ID NO: 1333 - protein, 11 aa, unidentified
  REGION 1..11: note = epitope involved in celiac disease
LQPFPQPELPY

SEQ ID NO: 1334 - protein, 11 aa, Triticum aestivum
LQPFPQPQLPY

SEQ ID NO: 1335 - protein, 20 aa, Triticum aestivum
LQPQQPFPQQPQQPYPQQPQ

SEQ ID NO: 1336 - protein, 20 aa, Triticum aestivum
LRPLFQLAQGLGIIQPQQPA

SEQ ID NO: 1337 - protein, 12 aa, Human alphaherpesvirus sp.
LRRGMFRPSQCN

SEQ ID NO: 1338 - protein, 8 aa, Triticum aestivum
PELPYPQP

SEQ ID NO: 1339 - protein, 14 aa, unidentified
  REGION 1..14: note = epitope involved in celiac disease
PEQPQQSFPEQERP

SEQ ID NO: 1340 - protein, 8 aa, Triticum aestivum
PFPQPELP

SEQ ID NO: 1341 - protein, 9 aa, Triticum aestivum
PFPQPQLPY

SEQ ID NO: 1342 - protein, 15 aa, Triticum aestivum
PFPQPQLPYPQPQLP

SEQ ID NO: 1343 - protein, 20 aa, Triticum aestivum
PFPQPQQTFPQQPQLPFPQQ

SEQ ID NO: 1344 - protein, 20 aa, Triticum aestivum
PFPQQPQQPFPQQPQQSFPQ

SEQ ID NO: 1345 - protein, 14 aa, Triticum aestivum
PFRPQQPYPQPQPQ

SEQ ID NO: 1346 - protein, 8 aa, Triticum aestivum
PFSQQQQQ

SEQ ID NO: 1347 - protein, 10 aa, Triticum aestivum
PFSQQQQSPF

SEQ ID NO: 1348 - protein, 20 aa, Triticum aestivum
PFTQPQQPTPIQPQQPFPQQ

SEQ ID NO: 1349 - protein, 8 aa, Triticum aestivum
PQPELPYP

SEQ ID NO: 1350 - protein, 9 aa, unidentified
  REGION 1..9: note = epitope involved in celiac disease
PQPELPYPQ

SEQ ID NO: 1351 - protein, 11 aa, unidentified
  REGION 1..11: note = epitope involved in celiac disease
PQPELPYPQPE

SEQ ID NO: 1352 - protein, 14 aa, unidentified
  REGION 1..14: note = epitope involved in celiac disease
PQPELPYPQPELPY

SEQ ID NO: 1353 - protein, 14 aa, unidentified
  REGION 1..14: note = epitope involved in celiac disease
PQPELPYPQPQLPY

SEQ ID NO: 1354 - protein, 9 aa, Triticum aestivum
PQPQLPYPQ

SEQ ID NO: 1355 - protein, 12 aa, Triticum aestivum
PQPQLPYPQPQL

SEQ ID NO: 1356 - protein, 14 aa, Triticum aestivum
PQPQLPYPQPQLPY

SEQ ID NO: 1357 - protein, 14 aa, Triticum aestivum
PQPQLPYPQPQLPY

SEQ ID NO: 1358 - protein, 14 aa, Triticum aestivum
PQPQLPYPQPQLPY

SEQ ID NO: 1359 - protein, 20 aa, Triticum aestivum
PQPQQPQLPFPQQPQQPFPQ

SEQ ID NO: 1360 - protein, 5 aa, Triticum aestivum
PQQPF

SEQ ID NO: 1361 - protein, 20 aa, Triticum aestivum
PQQPFPQPQQPQQPFPQSQQ

SEQ ID NO: 1362 - protein, 20 aa, Triticum aestivum
PQQPFPQPQQQFPQPQQPQQ

SEQ ID NO: 1363 - protein, 11 aa, Triticum aestivum
PQQPFPQQPQQ

SEQ ID NO: 1364 - protein, 11 aa, Triticum aestivum
PQQPFPQQPQQ

SEQ ID NO: 1365 - protein, 17 aa, Triticum aestivum
PQQPFPQQPQQPYPQQP

SEQ ID NO: 1366 - protein, 20 aa, Triticum aestivum
PQQPFPQSQQPQQPFPQPQQ

SEQ ID NO: 1367 - protein, 20 aa, Triticum aestivum
PQQPQQPFPLQPQQPFPQQP

SEQ ID NO: 1368 - protein, 14 aa, Triticum aestivum
PQQPQQSFPQQQRP

SEQ ID NO: 1369 - protein, 14 aa, Triticum aestivum
PQQPQQSFPQQQRP

SEQ ID NO: 1370 - protein, 9 aa, Triticum aestivum
PQQSFPEQE

SEQ ID NO: 1371 - protein, 9 aa, Triticum aestivum
PQQSFPQQQ

SEQ ID NO: 1372 - protein, 14 aa, Triticum aestivum
PQTQQPQQPFPQPQ

SEQ ID NO: 1373 - protein, 15 aa, Triticum aestivum
PSGQGSFQPSQQNPQ

SEQ ID NO: 1374 - protein, 9 aa, Triticum aestivum
PYPQPQLPY

SEQ ID NO: 1375 - protein, 9 aa, Triticum aestivum
PYPQPQLPY

SEQ ID NO: 1376 - protein, 15 aa, Triticum aestivum
QAQGSVQPQQLPQFE

SEQ ID NO: 1377 - protein, 20 aa, Triticum aestivum
QFPQPQQPQQSFPQQQQPAI

SEQ ID NO: 1378 - protein, 20 aa, Triticum aestivum
QFPQTQQPQQPFPQPQQTFP

SEQ ID NO: 1379 - protein, 10 aa, Triticum aestivum
QFQGQQQPFP

SEQ ID NO: 1380 - protein, 15 aa, Human alphaherpesvirus sp.
QGQQGYYPTSPQQSG

SEQ ID NO: 1381 - protein, 10 aa, Triticum aestivum
QGQQQPFPPQ

SEQ ID NO: 1382 - protein, 10 aa, Triticum aestivum
QLIPCMDVVL

SEQ ID NO: 1383 - protein, 13 aa, Triticum aestivum
QLPYPQPQLPYPQ

SEQ ID NO: 1384 - protein, 15 aa, Triticum aestivum
QLPYPQPQLPYPQPQ

SEQ ID NO: 1385 - protein, 8 aa, Triticum aestivum
QLQPFPQP

SEQ ID NO: 1386 - protein, 12 aa, Triticum aestivum
QLQPFPQPELPY

SEQ ID NO: 1387 - protein, 17 aa, Triticum aestivum
QLQPFPQPELPYPQPQS

SEQ ID NO: 1388 - protein, 17 aa, Triticum aestivum
QLQPFPQPELPYPQPQS

SEQ ID NO: 1389 - protein, 12 aa, Triticum aestivum
QLQPFPQPQLPY

SEQ ID NO: 1390 - protein, 12 aa, Triticum aestivum
QLQPFPQPQLPY

SEQ ID NO: 1391 - protein, 16 aa, Triticum aestivum
QLQPFPQPQLPYPQPQ

SEQ ID NO: 1392 - protein, 17 aa, Triticum aestivum
QLQPFPQPQLPYPQPQL

SEQ ID NO: 1393 - protein, 17 aa, Triticum aestivum
QLQPFPQPQLPYPQPQP

SEQ ID NO: 1394 - protein, 17 aa, Triticum aestivum
QLQPFPQPQLPYPQPQS

SEQ ID NO: 1395 - protein, 8 aa, Triticum aestivum
QPELPYPQ

SEQ ID NO: 1396 - protein, 8 aa, Triticum aestivum
QPFPQPEL

SEQ ID NO: 1397 - protein, 10 aa, unidentified
  REGION 1..10: note = epitope involved in celiac disease
QPFPQPELPY

SEQ ID NO: 1398 - protein, 10 aa, Triticum aestivum
QPFPQPQLPY

SEQ ID NO: 1399 - protein, 10 aa, Triticum aestivum
QPFPSQQPYL

SEQ ID NO: 1400 - protein, 13 aa, Triticum aestivum
QPQLPFPQQPQQP

SEQ ID NO: 1401 - protein, 15 aa, Triticum aestivum
QPQLPYPQPQLPYPQ

SEQ ID NO: 1402 - protein, 10 aa, Triticum aestivum
QPQPFPPQLP

SEQ ID NO: 1403 - protein, 21 aa, Triticum aestivum
QPQPFPQQSEQSQQPFQPQPF

SEQ ID NO: 1404 - protein, 10 aa, Triticum aestivum
QPQPFPSQQP

SEQ ID NO: 1405 - protein, 20 aa, Triticum aestivum
QPQPFRPQQPYPQPQPQYSQ

SEQ ID NO: 1406 - protein, 10 aa, unidentified
  REGION 1..10: note = epitope involved in celiac disease
QPQPQFPEQQ

SEQ ID NO: 1407 - protein, 19 aa, Triticum aestivum
QPQQPFPQQPQQPYPQQPQ

SEQ ID NO: 1408 - protein, 13 aa, Triticum aestivum
QPQQPIPVQPQQS

SEQ ID NO: 1409 - protein, 20 aa, Triticum aestivum
QPQQPIPVQPQQSFPQQSQQ

SEQ ID NO: 1410 - protein, 20 aa, Triticum aestivum
QPQQPQQPFPQQQQPLIQPY

SEQ ID NO: 1411 - protein, 16 aa, Triticum aestivum
QPQQPQQSFPQQQRPF

SEQ ID NO: 1412 - protein, 20 aa, Triticum aestivum
QPQQQYPSGQGSFQPSQQNP

SEQ ID NO: 1413 - protein, 10 aa, Triticum aestivum
QPQQSFPQQQ

SEQ ID NO: 1414 - protein, 12 aa, Triticum aestivum
QPQQSFPQQQRP

SEQ ID NO: 1415 - protein, 10 aa, unidentified
  REGION 1..10: note = epitope involved in celiac disease
QPQQTFPEQA

SEQ ID NO: 1416 - protein, 10 aa, Triticum aestivum
QPYPQPQPQY

SEQ ID NO: 1417 - protein, 20 aa, Triticum aestivum
QQFLQPQQPFPQQPQQPYPQ

SEQ ID NO: 1418 - protein, 13 aa, Triticum aestivum
QQGYYPTSPQQSG

SEQ ID NO: 1419 - protein, 20 aa, Triticum aestivum
QQLPQPQQPQQSFPQQQRPF

SEQ ID NO: 1420 - protein, 20 aa, Triticum aestivum
QQPFCQQPQRTIPQPHQTFH

SEQ ID NO: 1421 - protein, 5 aa, Triticum aestivum
QQPFP

SEQ ID NO: 1422 - protein, 20 aa, Triticum aestivum
QQPFPQQPQQPFPQPQQPIP

SEQ ID NO: 1423 - protein, 20 aa, Triticum aestivum
QQPLPQPQQPQQPFPQSQQP

SEQ ID NO: 1424 - protein, 15 aa, Triticum aestivum
QQPPFSQQQQQPLPQ

SEQ ID NO: 1425 - protein, 10 aa, Triticum durum
QQPQDAVQPF

SEQ ID NO: 1426 - protein, 20 aa, Triticum aestivum
QQPQLPFPQQPQQPFPQPQQ

SEQ ID NO: 1427 - protein, 20 aa, Triticum aestivum
QQPYPQPQPFPSQQPYLQLQ

SEQ ID NO: 1428 - protein, 20 aa, Triticum aestivum
QQQFIQPQQPFPQQPQQTYP

SEQ ID NO: 1429 - protein, 10 aa, Triticum aestivum
QQQPFPPQQP

SEQ ID NO: 1430 - protein, 20 aa, Triticum aestivum
QQQQPPFSQQQQSPFSQQQQ

SEQ ID NO: 1431 - protein, 20 aa, Triticum aestivum
QQTYPHQPQQQFPQTQQPQQ

SEQ ID NO: 1432 - protein, 21 aa, Triticum aestivum
  SITE 3: note = misc_feature - Xaa can be any naturally occurring amino acid
  SITE 8: note = misc_feature - Xaa can be any naturally occurring amino acid
  SITE 14: note = misc_feature - Xaa can be any naturally occurring amino acid
QQXSQPQXPQQQQXPQQPQQF

SEQ ID NO: 1433 - protein, 19 aa, Triticum aestivum
QQYPLGQGSFRPSQQNPQA

SEQ ID NO: 1434 - protein, 12 aa, Triticum aestivum
QSEQSQQPFQPQ

SEQ ID NO: 1435 - protein, 20 aa, Triticum aestivum
QSFLQQQMNPCKNFLLQQCN

SEQ ID NO: 1436 - protein, 20 aa, Triticum aestivum
QTQQPQQPFPQQPQQPFPQT

SEQ ID NO: 1437 - protein, 20 aa, Triticum aestivum
QVPLVQQQQFLGQQQPFPPQ

SEQ ID NO: 1438 - protein, 9 aa, Triticum aestivum
  SITE 2: note = misc_feature - Xaa can be any naturally occurring amino acid
QXPQQPQQF

SEQ ID NO: 1439 - protein, 20 aa, Triticum aestivum
SFPQQQQPAIQSFLQQQMNP

SEQ ID NO: 1440 - protein, 10 aa, Triticum aestivum
SFQQPQQQYP

SEQ ID NO: 1441 - protein, 12 aa, Triticum aestivum
SGQGSFQPSQQN

SEQ ID NO: 1442 - protein, 14 aa, Triticum aestivum
SGQGSFQPSQQNPQ

SEQ ID NO: 1443 - protein, 20 aa, Triticum aestivum
SQQPYLQLQPFPQPQLPYSQ

SEQ ID NO: 1444 - protein, 20 aa, Triticum aestivum
TIPQPHQTFHHQPQQTFPQP

SEQ ID NO: 1445 - protein, 20 aa, Triticum aestivum
TPIQPQQPFPQQPQQPQQPF

SEQ ID NO: 1446 - protein, 15 aa, Triticum aestivum
VQGQGIIQPQQPAQL

SEQ ID NO: 1447 - protein, 20 aa, Triticum aestivum
VYIPPYCTIAPFGIFGTNYR

SEQ ID NO: 1448 - protein, 20 aa, Triticum aestivum
WPQQQPFPQPQQPFCQQPQR

SEQ ID NO: 1449 - protein, 15 aa, Triticum aestivum
YLQLQPFPQPQLPYP

SEQ ID NO: 1450 - protein, 15 aa, Triticum aestivum
YPQPQLPYPQPQPFR

SEQ ID NO: 1451 - protein, 10 aa, Triticum aestivum
YPQPQPFPSQ

SEQ ID NO: 1452 - protein, 15 aa, Triticum aestivum
YPSGQGSFQPSQQNP

SEQ ID NO: 1453 - protein, 21 aa, Triticum aestivum
YQQLPQPQQPQQSFPQQQRPF

SEQ ID NO: 1454 - protein, 14 aa, unidentified
  REGION 1..14: note = epitope involved in celiac disease
QLQPFPQPELPYPQ

SEQ ID NO: 1455 - protein, 11 aa, Triticum aestivum
GIIQPQQPAQL

SEQ ID NO: 1456 - protein, 9 aa, Triticum aestivum
IQPQQPAQL

SEQ ID NO: 1457 - protein, 15 aa, Triticum aestivum
QPQQPQQSFPQQQRP

SEQ ID NO: 1458 - protein, 9 aa, Triticum aestivum
QQPFPQQPQ

SEQ ID NO: 1459 - protein, 9 aa, Triticum aestivum
QQPQQPYPQ

SEQ ID NO: 1460 - protein, 9 aa, Triticum aestivum
SQPQQQFPQ

SEQ ID NO: 1461 - protein, 18 aa, Triticum aestivum
FLGQQQPFPPQQPYPQPQ

SEQ ID NO: 1462 - protein, 20 aa, Triticum aestivum
FPGQQQPFPPQQPYPQPQPF

SEQ ID NO: 1463 - protein, 12 aa, Triticum aestivum
LGQQQPFPPQQP

SEQ ID NO: 1464 - protein, 19 aa, Triticum aestivum
QFLGQQQPFPPQQPYPQPQ

SEQ ID NO: 1465 - protein, 18 aa, Triticum aestivum
QNPSQQQPQEQVPLVQQQ

SEQ ID NO: 1466 - protein, 19 aa, Triticum aestivum
VRVPVPQLQPQNPSQQQPQ

SEQ ID NO: 1467 - protein, 15 aa, Triticum aestivum
QPQQPQQSFPQQQRP

SEQ ID NO: 1468 - protein, 8 aa, Triticum aestivum
VRVPVPQL

SEQ ID NO: 1469 - protein, 20 aa, unidentified
  REGION 1..20: note = epitope involved in celiac disease
LQLQPFPQPELPYPQPELPY

SEQ ID NO: 1470 - protein, 11 aa, unidentified
  REGION 1..11: note = epitope involved in celiac disease
LQPFPQPELPY

SEQ ID NO: 1471 - protein, 14 aa, Avena sativa
QYQPYPEQQQPFVQ

SEQ ID NO: 1472 - protein, 19 aa, Avena sativa
SEQYQPYPEQQEPFVQQQQ

SEQ ID NO: 1473 - protein, 22 aa, Avena nuda
TTTVQYDPSEQYQPYPEQQEPF

SEQ ID NO: 1474 - protein, 22 aa, Avena sativa
TTTVQYNPSEQYQPYPEQQEPF

SEQ ID NO: 1475 - protein, 12 aa, Avena sativa
YQPYPEQQEPFV

SEQ ID NO: 1476 - protein, 17 aa, Triticum aestivum
FPQPQLPYPQPQSQVLQ

SEQ ID NO: 1477 - protein, 15 aa, Triticum aestivum
LQLQPFPQPQLPYPQ

SEQ ID NO: 1478 - protein, 10 aa, Homo sapiens
AAEKQMKDKQ

SEQ ID NO: 1479 - protein, 10 aa, unidentified
  REGION 1..10: note = epitope involved in celiac disease
AEDKEDDAED

SEQ ID NO: 1480 - protein, 10 aa, Homo sapiens
AKIDDPTDSK

SEQ ID NO: 1481 - protein, 10 aa, unidentified
  REGION 1..10: note = epitope involved in celiac disease
ASFAEAPFSN

SEQ ID NO: 1482 - protein, 10 aa, unidentified
  REGION 1..10: note = epitope involved in celiac disease
DAEDKDEDEE

SEQ ID NO: 1483 - protein, 10 aa, Homo sapiens
DEEDKEEDEE

SEQ ID NO: 1484 - protein, 10 aa, unidentified
  REGION 1..10: note = epitope involved in celiac disease
EDDAEDKDED

SEQ ID NO: 1485 - protein, 10 aa, Homo sapiens
EDEEDEEDKE

SEQ ID NO: 1486 - protein, 10 aa, Homo sapiens
EDKDEDEEDE

SEQ ID NO: 1487 - protein, 10 aa, Homo sapiens
EDKEEDEEED

SEQ ID NO: 1488 - protein, 10 aa, Homo sapiens
EDKKRKEEEE

SEQ ID NO: 1489 - protein, 10 aa, unidentified
  REGION 1..10: note = epitope involved in celiac disease
EEAEDKEDDA

SEQ ID NO: 1490 - protein, 10 aa, Homo sapiens
EEDEEDKEED

SEQ ID NO: 1491 - protein, 10 aa, Homo sapiens
EEEDKKRKEE

SEQ ID NO: 1492 - protein, 10 aa, Homo sapiens
EEEEAEDKED

SEQ ID NO: 1493 - protein, 10 aa, Homo sapiens
EKDKGLQTSQ

SEQ ID NO: 1494 - protein, 10 aa, Homo sapiens
EKQMKDKQDE

SEQ ID NO: 1495 - protein, 10 aa, Homo sapiens
EQRLKEEEED

SEQ ID NO: 1496 - protein, 10 aa, unidentified
  REGION 1..10: note = epitope involved in celiac disease
FAEAPFSNKG

SEQ ID NO: 1497 - protein, 10 aa, Homo sapiens
GLQTSQDARF

SEQ ID NO: 1498 - protein, 10 aa, Homo sapiens
GVTKAAEKQM

SEQ ID NO: 1499 - protein, 10 aa, Homo sapiens
IFDNFLITND

SEQ ID NO: 1500 - protein, 10 aa, Homo sapiens
KDEDEEDEED

SEQ ID NO: 1501 - protein, 10 aa, Homo sapiens
KEEEEDKKRK

SEQ ID NO: 1502 - protein, 10 aa, Homo sapiens
KGKNVLINKD

SEQ ID NO: 1503 - protein, 10 aa, Homo sapiens
KIKDPDASKP

SEQ ID NO: 1504 - protein, 10 aa, Homo sapiens
KLFPNSLDQT

SEQ ID NO: 1505 - protein, 10 aa, Homo sapiens
KQDEEQRLKE

SEQ ID NO: 1506 - protein, 10 aa, Homo sapiens
KSGTIFDNFL

SEQ ID NO: 1507 - protein, 10 aa, Homo sapiens
LPPKKIKDPD

SEQ ID NO: 1508 - protein, 10 aa, Homo sapiens
QVKSGTIFDN

SEQ ID NO: 1509 - protein, 10 aa, Homo sapiens
RKEEEEAEDK

SEQ ID NO: 1510 - protein, 10 aa, Homo sapiens
RLKEEEEDKK

SEQ ID NO: 1511 - protein, 10 aa, Homo sapiens
TKAAEKQMKD

SEQ ID NO: 1512 - protein, 21 aa, Triticum aestivum
AHGRSQVLQQSTYQLLQELCC

SEQ ID NO: 1513 - protein, 21 aa, Triticum aestivum
AQGSVQPQQLPQFEEIRNLAL

SEQ ID NO: 1514 - protein, 21 aa, Triticum aestivum
FCMDVVLQQHNIAHGRSQVLQ

SEQ ID NO: 1515 - protein, 18 aa, Triticum aestivum
HNIAHGRSQVLQQSTYQL

SEQ ID NO: 1516 - protein, 21 aa, Triticum aestivum
LCCQHLWQIPEQSQCQAIHNV

SEQ ID NO: 1517 - protein, 15 aa, Triticum aestivum
LPYSQPQPFRPQQPY

SEQ ID NO: 1518 - protein, 21 aa, Triticum aestivum
LPYSQPQPFRPQQPYPQPQPQ

SEQ ID NO: 1519 - protein, 21 aa, Triticum aestivum
LQQHNIAHGRSQVLQQSTYQL

SEQ ID NO: 1520 - protein, 21 aa, Triticum aestivum
LQQQLIFCMDVVLQQHNIAHG

SEQ ID NO: 1521 - protein, 21 aa, Triticum aestivum
MKTFLILALLAIVATTATTAV

SEQ ID NO: 1522 - protein, 21 aa, Triticum aestivum
PLVQQQQFLGQQQPFPPQQPY

SEQ ID NO: 1523 - protein, 18 aa, Triticum aestivum
PPQQPYPQPQPFPSQQPY

SEQ ID NO: 1524 - protein, 21 aa, Triticum aestivum
PQQPISQQQQQQQQQQQQQQQ

SEQ ID NO: 1525 - protein, 21 aa, Triticum aestivum
QFLGQQQPFPPQQPYPQPQPF

SEQ ID NO: 1526 - protein, 21 aa, Triticum aestivum
QGSFRPSQQNPQAQGSVQPQQ

SEQ ID NO: 1527 - protein, 21 aa, Triticum aestivum
QNPSQQQPQEQVPLVQQQQFL

SEQ ID NO: 1528 - protein, 21 aa, Triticum aestivum
QPFPPQLPYSQPQPFRPQQPY

SEQ ID NO: 1529 - protein, 21 aa, Triticum aestivum
QPFPPQQPYPQPQPFPSQQPY

SEQ ID NO: 1530 - protein, 11 aa, Triticum aestivum
QPFPQPQLPYP

SEQ ID NO: 1531 - protein, 21 aa, Triticum aestivum
QPFPQPQLPYSQPQPFRPQQP

SEQ ID NO: 1532 - protein, 21 aa, Triticum aestivum
QPFPSQQPYLQLQPFPQPQLP

SEQ ID NO: 1533 - protein, 21 aa, Triticum aestivum
QPFRPQQPYPQPQPQYSQPQQ

SEQ ID NO: 1534 - protein, 21 aa, Triticum aestivum
QPQEQVPLVQQQQFLGQQQPF

SEQ ID NO: 1535 - protein, 21 aa, Triticum aestivum
QPQYSQPQQPISQQQQQQQQQ

SEQ ID NO: 1536 - protein, 21 aa, Triticum aestivum
QPSSQVSFQQPLQQYPLGQGS

SEQ ID NO: 1537 - protein, 21 aa, Triticum aestivum
QPYLQLQPFPQPQLPYSQPQP

SEQ ID NO: 1538 - protein, 21 aa, Triticum aestivum
QPYPQPQPFPSQQPYLQLQPF

SEQ ID NO: 1539 - protein, 21 aa, Triticum aestivum
QPYPQPQPQYSQPQQPISQQQ

SEQ ID NO: 1540 - protein, 21 aa, Triticum aestivum
QQKQQQQPSSQVSFQQPLQQY

SEQ ID NO: 1541 - protein, 18 aa, Triticum aestivum
QQQQFLGQQQPFPPQQPY

SEQ ID NO: 1542 - protein, 18 aa, Triticum aestivum
QQQQPSSQVSFQQPLQQY

SEQ ID NO: 1543 - protein, 21 aa, Triticum aestivum
QQQQQQQQQQQQQILQQILQQ

SEQ ID NO: 1544 - protein, 21 aa, Triticum aestivum
QQQQQQQQQQQQQQQQQQQIL

SEQ ID NO: 1545 - protein, 10 aa, Triticum aestivum
QQRPFIQPSL

SEQ ID NO: 1546 - protein, 21 aa, Triticum aestivum
QQYPLGQGSFRPSQQNPQAQG

SEQ ID NO: 1547 - protein, 21 aa, Triticum aestivum
SFQQPLQQYPLGQGSFRPSQQ

SEQ ID NO: 1548 - protein, 21 aa, Triticum aestivum
SQCQAIHNVVHAIILHQQQQQ

SEQ ID NO: 1549 - protein, 21 aa, Triticum aestivum
SQQNPQAQGSVQPQQLPQFEE

SEQ ID NO: 1550 - protein, 21 aa, Triticum aestivum
TAVRVPVPQLQPQNPSQQQPQ

SEQ ID NO: 1551 - protein, 21 aa, Triticum aestivum
VLQQSTYQLLQELCCQHLWQI

SEQ ID NO: 1552 - protein, 21 aa, Triticum aestivum
VPQLQPQNPSQQQPQEQVPLV

SEQ ID NO: 1553 - protein, 21 aa, Triticum aestivum
YQLLQELCCQHLWQIPEQSQC

SEQ ID NO: 1554 - protein, 12 aa, Triticum aestivum
AHGRSQVLQQST

SEQ ID NO: 1555 - protein, 12 aa, Triticum aestivum
ALQTLPAMCNVY

SEQ ID NO: 1556 - protein, 12 aa, Triticum aestivum
AMCNVYIPPYCT

SEQ ID NO: 1557 - protein, 12 aa, Triticum aestivum
EEIRNLALQTLP

SEQ ID NO: 1558 - protein, 12 aa, Triticum aestivum
FPPQQPYPQPQP

SEQ ID NO: 1559 - protein, 12 aa, Triticum aestivum
FPQPQLPYSQPQ

SEQ ID NO: 1560 - protein, 12 aa, Triticum aestivum
FPSQQPYLQLQP

SEQ ID NO: 1561 - protein, 12 aa, Triticum aestivum
FQQPLQQYPLGQ

SEQ ID NO: 1562 - protein, 12 aa, Triticum aestivum
GSFRPSQQNPQA

SEQ ID NO: 1563 - protein, 12 aa, Triticum aestivum
HNVVHAIILHQQ

SEQ ID NO: 1564 - protein, 12 aa, Triticum aestivum
IILHQQQKQQQQ

SEQ ID NO: 1565 - protein, 12 aa, Triticum aestivum
IPPYCTIAPFGI

SEQ ID NO: 1566 - protein, 12 aa, Triticum aestivum
LCCQHLWQIPEQ

SEQ ID NO: 1567 - protein, 12 aa, Triticum aestivum
LQQHNIAHGRSQ

SEQ ID NO: 1568 - protein, 12 aa, Triticum aestivum
LQQQLIPCMDVV

SEQ ID NO: 1569 - protein, 12 aa, Triticum aestivum
PCMDVVLQQHNI

SEQ ID NO: 1570 - protein, 12 aa, Triticum aestivum
PFRPQQPYPQPQ

SEQ ID NO: 1571 - protein, 12 aa, Triticum aestivum
PQYSQPQQPISQ

SEQ ID NO: 1572 - protein, 12 aa, Triticum aestivum
PSQQQPQEQVPL

SEQ ID NO: 1573 - protein, 12 aa, Triticum aestivum
PSSQVSFQQPLQ

SEQ ID NO: 1574 - protein, 12 aa, Triticum aestivum
PYSQPQPFRPQQ

SEQ ID NO: 1575 - protein, 12 aa, Triticum aestivum
QEQVPLVQQQQF

SEQ ID NO: 1576 - protein, 12 aa, Triticum aestivum
QGSVQPQQLPQF

SEQ ID NO: 1577 - protein, 12 aa, Triticum aestivum
QILQQILQQQLI

SEQ ID NO: 1578 - protein, 12 aa, Triticum aestivum
QKQQQQPSSQVS

SEQ ID NO: 1579 - protein, 12 aa, Triticum aestivum
QLQPQNPSQQQP

SEQ ID NO: 1580 - protein, 12 aa, Triticum aestivum
QQNPQAQGSVQP

SEQ ID NO: 1581 - protein, 12 aa, Triticum aestivum
QQPISQQILQQI

SEQ ID NO: 1582 - protein, 12 aa, Triticum aestivum
QYPLGQGSFRPS

SEQ ID NO: 1583 - protein, 12 aa, Triticum aestivum
SQCQAIHNVVHA

SEQ ID NO: 1584 - protein, 11 aa, Triticum aestivum
TIAPFGIFGTN

SEQ ID NO: 1585 - protein, 12 aa, Triticum aestivum
VLQQSTYQLLQE

SEQ ID NO: 1586 - protein, 12 aa, Triticum aestivum
VQQQQFLGQQQP

SEQ ID NO: 1587 - protein, 12 aa, Triticum aestivum
WQIPEQSQCQAI

SEQ ID NO: 1588 - protein, 12 aa, Triticum aestivum
YLQLQPFPQPQL

SEQ ID NO: 1589 - protein, 12 aa, Triticum aestivum
YPQPQPFPSQQP

SEQ ID NO: 1590 - protein, 12 aa, Triticum aestivum
YQLLQELCCQHL

SEQ ID NO: 1591 - protein, 15 aa, Triticum aestivum
QLQPFPQPQLPYPQP

SEQ ID NO: 1592 - protein, 12 aa, unidentified
  REGION 1..12: note = epitope involved in celiac disease
FPQQPEQPYPQQ

SEQ ID NO: 1593 - protein, 15 aa, Triticum aestivum
GQGIIQPQQPAQLIR

SEQ ID NO: 1594 - protein, 33 aa, Triticum aestivum; identical to SEQ ID NO: 1331

SEQ ID NO: 1595 - protein, 9 aa, Triticum aestivum
PFPQPQLPY

SEQ ID NO: 1596 - protein, 15 aa, Triticum aestivum
PFPQQPQQPYPQQPQ

SEQ ID NO: 1597 - protein, 25 aa, Triticum aestivum
PQLPQFLQPQPYPQPQLPYPQPQPF

SEQ ID NO: 1598 - protein, 9 aa, Triticum aestivum
PQPQLPQPQ

SEQ ID NO: 1599 - protein, 17 aa, Triticum aestivum
PQPQPFLPQLPYPQPQS

SEQ ID NO: 1600 - protein, 17 aa, Triticum aestivum
PQPQPFPPQLPYPQPQS

SEQ ID NO: 1601 - protein, 14 aa, Triticum aestivum
PQQPFPSQQQQPLI

SEQ ID NO: 1602 - protein, 15 aa, Triticum aestivum
PQQPQQSFPQQQQPA

SEQ ID NO: 1603 - protein, 14 aa, Triticum aestivum
PQQQTLQPQQPAQL

SEQ ID NO: 1604 - protein, 15 aa, Triticum aestivum
QIPQQQQIPQQPQQF

SEQ ID NO: 1605 - protein, 17 aa, Triticum aestivum
QLQPFPQPTLPYPQPQS

SEQ ID NO: 1606 - protein, 18 aa, Triticum aestivum
QPQPYPQPQLPYPQPQPF

SEQ ID NO: 1607 - protein, 17 aa, Triticum aestivum
QPQQPFPQPQQPFPWQP

SEQ ID NO: 1608 - protein, 15 aa, Triticum aestivum
QQFSQPQQQFPQPQQ

SEQ ID NO: 1609 - protein, 18 aa, unidentified
  REGION 1..18: note = epitope involved in celiac disease
QYPSGEGSFQPSQENPQA

SEQ ID NO: 1610 - protein, 6 aa, Triticum aestivum
QQQPFP

SEQ ID NO: 1611 - protein, 8 aa, Homo sapiens
ASFEPFSN

SEQ ID NO: 1612 - protein, 8 aa, Homo sapiens
FEPFSNKG

SEQ ID NO: 1613 - protein, 9 aa, Triticum aestivum
PQPQLPYPQ

SEQ ID NO: 1614 - protein, 9 aa, Triticum aestivum
QGSFQPSQQ

SEQ ID NO: 1615 - protein, 18 aa, Triticum aestivum
QPQQPFPQPQQPFPWQPQ

SEQ ID NO: 1616 - protein, 9 aa, Triticum aestivum
QQPQQPFPQ

SEQ ID NO: 1617 - protein, 9 aa, Triticum aestivum
QQPQQPYPQ

SEQ ID NO: 1618 - protein, 13 aa, Triticum aestivum
LGEGSFQPSQENP

SEQ ID NO: 1619 - protein, 15 aa, Triticum aestivum
LQPFPQPQLPYPQPQ

SEQ ID NO: 1620 - protein, 15 aa, Triticum aestivum
LQPFPQPQLPYSQPQ

SEQ ID NO: 1621 - protein, 16 aa, Triticum aestivum
QLQPFPHPQLPYPHPQ

SEQ ID NO: 1622 - protein, 16 aa, Triticum aestivum
QLQPFPHPQLPYPQPQ

SEQ ID NO: 1623 - protein, 16 aa, Triticum aestivum
QLQPFPQAQLPYSQPQ

SEQ ID NO: 1624 - protein, 16 aa, Triticum aestivum
QLQPFPQPQLPYPQPE

SEQ ID NO: 1625 - protein, 16 aa, Triticum aestivum
QLQPFPQPQLPYPQPQ

SEQ ID NO: 1626 - protein, 16 aa, Triticum aestivum
QLQPFPQPQLPYSQPE

SEQ ID NO: 1627 - protein, 16 aa, Triticum aestivum
QLQPFPQPQLPYSQPQ

SEQ ID NO: 1628 - protein, 14 aa, Aegilops tauschii
QLQPFPQPQLPYTH

SEQ ID NO: 1629 - protein, 16 aa, Triticum aestivum
QLQPFSQPQLPYSQPQ

SEQ ID NO: 1630 - protein, 17 aa, Triticum aestivum
QLQRPFPQPQLPYPQPE

SEQ ID NO: 1631 - protein, 15 aa, Triticum aestivum
QPFRPQQPYPQPQPQ

SEQ ID NO: 1632 - protein, 15 aa, Triticum aestivum
QPQPFLPQLPYPQPE

SEQ ID NO: 1633 - protein, 15 aa, Triticum aestivum
QPQPFQPQLPYPQPE

SEQ ID NO: 1634 - protein, 14 aa, Triticum aestivum
PQTQQPQQPFPQPQ

SEQ ID NO: 1635 - protein, 20 aa, Triticum aestivum
FEEIRNLALQTLPAMCNVYI

SEQ ID NO: 1636 - protein, 20 aa, Triticum aestivum
FLGQQQSFPPQQPYPQPQPF

SEQ ID NO: 1637 - protein, 17 aa, Triticum aestivum
PPYCTIVPFGIFGTNYR

SEQ ID NO: 1638 - protein, 20 aa, Triticum aestivum
QLIPCMDVVLQQHNIAHGRS

SEQ ID NO: 1639 - protein, 20 aa, Triticum aestivum
QVLQQSTYQLLQELCCQHLW

SEQ ID NO: 1640 - protein, 4 aa, Triticum aestivum
FFQP

SEQ ID NO: 1641 - protein, 8 aa, Triticum aestivum
IILHQQHH

SEQ ID NO: 1642 - protein, 4 aa, Triticum aestivum
IPEQ

SEQ ID NO: 1643 - protein, 8 aa, Triticum aestivum
PLVQEQQF

SEQ ID NO: 1644 - protein, 6 aa, Triticum aestivum
PQQLPQ

SEQ ID NO: 1645 - protein, 6 aa, Triticum aestivum
QGFFQP

SEQ ID NO: 1646 - protein, 6 aa, Triticum aestivum
QGSFQP

SEQ ID NO: 1647 - protein, 6 aa, Triticum aestivum
QLQPFP

SEQ ID NO: 1648 - protein, 6 aa, Triticum aestivum
QPQPFP

SEQ ID NO: 1649 - protein, 6 aa, Triticum aestivum
QPQQPF

SEQ ID NO: 1650 - protein, 8 aa, Triticum aestivum
QVPLVQEQ

SEQ ID NO: 1651 - protein, 6 aa, Triticum aestivum
WQIPEQ

SEQ ID NO: 1652 - protein, 11 aa, Triticum aestivum
PQPQLPYPQPQ

SEQ ID NO: 1653 - protein, 10 aa, Triticum aestivum
FPPQQPYPQP

SEQ ID NO: 1654 - protein, 10 aa, Triticum aestivum
LQQQQQQQQQ

SEQ ID NO: 1655 - protein, 10 aa, Triticum aestivum
PQQPYPQPQP

SEQ ID NO: 1656 - protein, 10 aa, Triticum aestivum
QKQQLQQQQQ

SEQ ID NO: 1657 - protein, 10 aa, Triticum aestivum
QLQPFPQPQP

SEQ ID NO: 1658 - protein, 10 aa, Triticum aestivum
QPFPQPQPFP

SEQ ID NO: 1659 - protein, 10 aa, Triticum aestivum
QPYLQLQPFP

SEQ ID NO: 1660 - protein, 10 aa, Triticum aestivum
QPYPQPQPFP

SEQ ID NO: 1661 - protein, 10 aa, Triticum aestivum
QQQQQILQQI

SEQ ID NO: 1662 - protein, 10 aa, Triticum aestivum
QQQQQQLQQQ

SEQ ID NO: 1663 - protein, 10 aa, Triticum aestivum
QQQQQQQILQ

SEQ ID NO: 1664 - protein, 10 aa, Triticum aestivum
QQQQQQQQLQ

SEQ ID NO: 1665 - protein, 10 aa, Triticum aestivum
QQQQQQQQQI

SEQ ID NO: 1666 - protein, 10 aa, Triticum aestivum
QVSFQQPQQQ

SEQ ID NO: 1667 - protein, 10 aa, Triticum aestivum
RDVVLQQHNI

SEQ ID NO: 1668 - protein, 10 aa, Triticum aestivum
RNLALQTLPA

SEQ ID NO: 1669 - protein, 10 aa, Triticum aestivum
SQQPYLQLQP

SEQ ID NO: 1670 - protein, 10 aa, Triticum aestivum
YLQLQPFPQP

SEQ ID NO: 1671 - protein, 10 aa, Triticum aestivum
CQQLWQIPEQ

SEQ ID NO: 1672 - protein, 10 aa, Triticum aestivum
FEEIRNLALQ

SEQ ID NO: 1673 - protein, 10 aa, Triticum aestivum
FLPQQPYPQP

SEQ ID NO: 1674 - protein, 10 aa, Triticum aestivum
FQPQQLPQFE

SEQ ID NO: 1675 - protein, 10 aa, Triticum aestivum
GSFQPQQLPQ

SEQ ID NO: 1676 - protein, 10 aa, Triticum aestivum
IAPFGIFGTN

SEQ ID NO: 1677 - protein, 10 aa, Triticum aestivum
LPYPQPQPFL

SEQ ID NO: 1678 - protein, 10 aa, Triticum aestivum
LSQVSFQQPQ

SEQ ID NO: 1679 - protein, 10 aa, Triticum aestivum
PLVQEQQFQG

SEQ ID NO: 1680 - protein, 10 aa, Triticum aestivum
PQFEEIRNLA

SEQ ID NO: 1681 - protein, 10 aa, Triticum aestivum
PQQLPQFEEI

SEQ ID NO: 1682 - protein, 10 aa, Triticum aestivum
PQQPISQQQQ

SEQ ID NO: 1683 - protein, 10 aa, Triticum aestivum
PQQQYPSGQG

SEQ ID NO: 1684 - protein, 10 aa, Triticum aestivum
QEQVPLVQEQ

SEQ ID NO: 1685 - protein, 10 aa, Triticum aestivum
QESTYQLVQQ

SEQ ID NO: 1686 - protein, 10 aa, Triticum aestivum
QGFFQPSQQN

SEQ ID NO: 1687 - protein, 10 aa, Triticum aestivum
QLPQFEEIRN

SEQ ID NO: 1688 - protein, 10 aa, Triticum aestivum
QLQLQNPSQQ

SEQ ID NO: 1689 - protein, 10 aa, Triticum aestivum
QLWQIPEQSR

SEQ ID NO: 1690 - protein, 10 aa, Triticum aestivum
QPFLPQQPYP

SEQ ID NO: 1691 - protein, 10 aa, Triticum aestivum
QPFPPQQPYP

SEQ ID NO: 1692 - protein, 10 aa, Triticum aestivum
QPISQQQQQQ

SEQ ID NO: 1693 - protein, 10 aa, Triticum aestivum
QPLSQVSFQQ

SEQ ID NO: 1694 - protein, 10 aa, Triticum aestivum
QPQPFLPQQP

SEQ ID NO: 1695 - protein, 10 aa, Triticum aestivum
QPQYSQPQQP

SEQ ID NO: 1696 - protein, 10 aa, Triticum aestivum
QQHHHHQEQK

SEQ ID NO: 1697 - protein, 10 aa, Triticum aestivum
QQPQQQYPSG

SEQ ID NO: 1698 - protein, 10 aa, Triticum aestivum
QQQPLSQVSF

SEQ ID NO: 1699 - protein, 10 aa, Triticum aestivum
QQQQQPLSQV

SEQ ID NO: 1700 - protein, 10 aa, Triticum aestivum
QQQQQQQPLS

SEQ ID NO: 1701 - protein, 10 aa, Triticum aestivum
QQYPSGQGFF

SEQ ID NO: 1702 - protein, 10 aa, Triticum aestivum
QVPLVQEQQF

SEQ ID NO: 1703 - protein, 10 aa, Triticum aestivum
QYSQPQQPIS

SEQ ID NO: 1704 - protein, 10 aa, Triticum aestivum
SGQGFFQPSQ

SEQ ID NO: 1705 - protein, 10 aa, Triticum aestivum
SQPQQPISQQ

SEQ ID NO: 1706 - protein, 10 aa, Triticum aestivum
STTIAPFGIF

SEQ ID NO: 1707 - protein, 10 aa, Triticum aestivum
TIAPFGIFGT

SEQ ID NO: 1708 - protein, 10 aa, Triticum aestivum
VLQESTYQLV

SEQ ID NO: 1709 - protein, 10 aa, Triticum aestivum
VPQLQLQNPS

SEQ ID NO: 1710 - protein, 10 aa, Triticum aestivum
VPVPQLQLQN

SEQ ID NO: 1711 - protein, 10 aa, Triticum aestivum
VRVPVPQLQL

SEQ ID NO: 1712 - protein, 10 aa, Triticum aestivum
WQIPEQSRCQ

SEQ ID NO: 1713 - protein, 10 aa, Triticum aestivum
YPQPQPFLPQ

SEQ ID NO: 1714 - protein, 10 aa, Triticum aestivum
YPSGQGFFQP

SEQ ID NO: 1715 - protein, 12 aa, Triticum aestivum
FPQPQQQFPQPQ

SEQ ID NO: 1716 - protein, 12 aa, Triticum aestivum
FPQQPQQPYPQQ

SEQ ID NO: 1717 - protein, 20 aa, Triticum aestivum
LQPQQPFPQQPQQPYPQQPQ

SEQ ID NO: 1718 - protein, 18 aa, Triticum aestivum
PHQPQQQVPQPQQPQQPF

SEQ ID NO: 1719 - protein, 14 aa, Triticum aestivum
PQQPQQSFPQQQRP

SEQ ID NO: 1720 - protein, 17 aa, Triticum aestivum
QPQQPFPQPQQPFPWQP

SEQ ID NO: 1721 - protein, 23 aa, Secale strictum
QQPFPQQPQQPYPQQPQQPFPQP

SEQ ID NO: 1722 - protein, 19 aa, Triticum aestivum
SHQQQPFPQQPYPQQPYPS

SEQ ID NO: 1723 - protein, 9 aa, Triticum aestivum
EGSFQPSQE

SEQ ID NO: 1724 - protein, 9 aa, Triticum aestivum
QGYYPTSPQ

SEQ ID NO: 1725 - protein, 687 aa, Homo sapiens
MAEELVLERCDLELETNGRDHHTADLCREKLVVRRGQPFWLTLHFEGRNYEASVDSLTFSVVTGPAPSQEAGTKARFPLRDAVEEGDWTATVVDQQDCTLSLQLTTPANAPIGLYRLSLEASTGYQGSSFVLGHFILLFNAWCPADAVYLDSEEERQEYVLTQQGFIYQGSAKFIKNIPWNFGQFEDGILDICLILLDVNPKFLKNAGRDCSRRSSPVYVGRVVSGMVNCNDDQGVLLGRWDNNYGDGVSPMSWIGSVDILRRWKNHGCQRVKYGQCWVFAAVACTVLRCLGIPTRVVTNYNSAHDQNSNLLIEYFRNEFGEIQGDKSEMIWNFHCWVESWMTRPDLQPGYEGWQALDPTPQEKSEGTYCCGPVPVRAIKEGDLSTKYDAPFVFAEVNADVVDWIQQDDGSVHKSINRSLIVGLKISTKSVGRDEREDITHTYKYPEGSSEEREAFTRANHLNKLAEKEETGMAMRIRVGQSMNMGSDFDVFAHITNNTAEEYVCRLLLCARTVSYNGILGPECGTKYLLNLNLEPFSEKSVPLCILYEKYRDCLTESNLIKVRALLVEPVINSYLLAERDLYLENPEIKIRILGEPKQKRKLVAEVSLQNPLPVALEGCTFTVEGAGLTEEQKTVEIPDPVEAGEEVKVRMDLLPLHMGLHKLVVNFESDKLKAVKGFRNVIIGPA

SEQ ID NO: 1726 - protein, 15 aa, unidentified
  REGION 1..15: note = epitope involved in celiac disease
FPEQPQQPYPQQPQQ

SEQ ID NO: 1727 - protein, 14 aa, unidentified
  REGION 1..14: note = epitope involved in celiac disease
PQTEQPQQPFPQPQ

SEQ ID NO: 1728 - protein, 13 aa, unidentified
  REGION 1..13: note = epitope involved in celiac disease
QEGYYPTSPEQSG

SEQ ID NO: 1729 - protein, 13 aa, unidentified
  REGION 1..13: note = epitope involved in celiac disease
QEGYYPTSPQQSG

SEQ ID NO: 1730 - protein, 13 aa, unidentified
  REGION 1..13: note = epitope involved in celiac disease
QQGYYPTSPEQSG

SEQ ID NO: 1731 - protein, 14 aa, unidentified
  REGION 1..14: note = epitope involved in celiac disease
SGEGSFQPSQQNPQ

SEQ ID NO: 1732 - protein, 12 aa, unidentified
  REGION 1..12: note = epitope involved in celiac disease
QLQPFSQPQLPY

SEQ ID NO: 1733 - protein, 15 aa, unidentified
  REGION 1..15: note = epitope involved in celiac disease
QQPPFAEQEQPVLPQ

SEQ ID NO: 1734 - protein, 15 aa, unidentified
  REGION 1..15: note = epitope involved in celiac disease
QQPPFGEQEQPVLPQ

SEQ ID NO: 1735 - protein, 15 aa, Triticum aestivum
QQPPFSQQQQPVLPQ

SEQ ID NO: 1736 - protein, 15 aa, Triticum aestivum
QQPPFSQQQQQPLPQ

SEQ ID NO: 1737 - protein, 20 aa, Triticum aestivum
QQQQPPFSQQQQSPFSQQQQ

SEQ ID NO: 1738 - protein, 14 aa, unidentified
  REGION 1..14: note = epitope involved in celiac disease
AQPEQPEQPFPQPQ

SEQ ID NO: 1739 - protein, 14 aa, unidentified
  REGION 1..14: note = epitope involved in celiac disease
KQPEQPEQPFPQPQ

SEQ ID NO: 1740 - protein, 14 aa, unidentified
  REGION 1..14: note = epitope involved in celiac disease
PAPEQPEQPFPQPQ

SEQ ID NO: 1741 - protein, 14 aa, unidentified
  REGION 1..14: note = epitope involved in celiac disease
PKPEQPEQPFPQPQ

SEQ ID NO: 1742 - protein, 14 aa, unidentified
  REGION 1..14: note = epitope involved in celiac disease
PQAEQPEQPFPQPQ

SEQ ID NO: 1743 - protein, 14 aa, unidentified
  REGION 1..14: note = epitope involved in celiac disease
PQKEQPEQPFPQPQ

SEQ ID NO: 1744 - protein, 14 aa, unidentified
  REGION 1..14: note = epitope involved in celiac disease
PQPAQPEQPFPQPQ

SEQ ID NO: 1745 - protein, 14 aa, unidentified
  REGION 1..14: note = epitope involved in celiac disease
PQPEAPEQPFPQPQ

SEQ ID NO: 1746 - protein, 14 aa, unidentified
  REGION 1..14: note = epitope involved in celiac disease
PQPEQAEQPFPQPQ

SEQ ID NO: 1747 - protein, 14 aa, unidentified
  REGION 1..14: note = epitope involved in celiac disease
PQPEQPAQPFPQPQ

SEQ ID NO: 1748 - protein, 14 aa, unidentified
  REGION 1..14: note = epitope involved in celiac disease
PQPEQPEAPFPQPQ

SEQ ID NO: 1749 - protein, 14 aa, unidentified
  REGION 1..14: note = epitope involved in celiac disease
PQPEQPEQAFPQPQ

SEQ ID NO: 1750 - protein, 14 aa, unidentified
  REGION 1..14: note = epitope involved in celiac disease
PQPEQPEQPAPQPQ

SEQ ID NO: 1751 - protein, 14 aa, unidentified
  REGION 1..14: note = epitope involved in celiac disease
PQPEQPEQPFAQPQ

SEQ ID NO: 1752 - protein, 14 aa, unidentified
  REGION 1..14: note = epitope involved in celiac disease
PQPEQPEQPFPAPQ

SEQ ID NO: 1753 - protein, 14 aa, unidentified
  REGION 1..14: note = epitope involved in celiac disease
PQPEQPEQPFPKPQ

SEQ ID NO: 1754 - protein, 14 aa, unidentified
  REGION 1..14: note = epitope involved in celiac disease
PQPEQPEQPFPQAQ

SEQ ID NO: 1755 - protein, 14 aa, unidentified
  REGION 1..14: note = epitope involved in celiac disease
PQPEQPEQPFPQKQ

SEQ ID NO: 1756 - protein, 14 aa, unidentified
  REGION 1..14: note = epitope involved in celiac disease
PQPEQPEQPFPQPA

SEQ ID NO: 1757 - protein, 14 aa, unidentified
  REGION 1..14: note = epitope involved in celiac disease
PQPEQPEQPFPQPK

SEQ ID NO: 1758 - protein, 14 aa, unidentified
  REGION 1..14: note = epitope involved in celiac disease
PQPEQPEQPFPQPQ

SEQ ID NO: 1759 - protein, 14 aa, unidentified
  REGION 1..14: note = epitope involved in celiac disease
PQPEQPQQPFPQPQ

SEQ ID NO: 1760 - protein, 14 aa, unidentified
  REGION 1..14: note = epitope involved in celiac disease
PQPQQPEQPFPQPQ

SEQ ID NO: 1761 - protein, 17 aa, Triticum aestivum
QPQQPQQPFPQQQQPLI

SEQ ID NO: 1762 - protein, 17 aa, Triticum aestivum
QPQQPQQSFPQQQQLMI

SEQ ID NO: 1763 - protein, 17 aa, Triticum aestivum
QPQQPQQSFPQQQQPAI

SEQ ID NO: 1764 - protein, 17 aa, Triticum aestivum
QPQQPQQSFPQQQQPLI

SEQ ID NO: 1765 - protein, 18 aa, Triticum aestivum
QQYPSGQGSFQPSQQNPQ

SEQ ID NO: 1766 - protein, 13 aa, Triticum aestivum
SGQGSFQPSQQNP

SEQ ID NO: 1767 - protein, 15 aa, Homo sapiens
CDGERPTLAFLQDVM

SEQ ID NO: 1768 - protein, 9 aa, Human alphaherpesvirus sp.
CTELKLSDY

SEQ ID NO: 1769 - protein, 10 aa, Homo sapiens
DGVAVLKVGG

SEQ ID NO: 1770 - protein, 17 aa, Human alphaherpesvirus sp.
EAIPALTAVETGHTSQV

SEQ ID NO: 1771 - protein, 17 aa, Mycobacterium tuberculosis
EGDEATGANIVKVALEA

SEQ ID NO: 1772 - protein, 9 aa, Human alphaherpesvirus sp.
ELRSRYWAI

SEQ ID NO: 1773 - protein, 15 aa, Homo sapiens
FVNQHLCGSHLVEAL

SEQ ID NO: 1774 - protein, 20 aa, Human alphaherpesvirus sp.
GAHETSLSASGNSIIHYTNI

SEQ ID NO: 1775 - protein, 10 aa, Homo sapiens
GCALLRCIPA

SEQ ID NO: 1776 - protein, 10 aa, Mycobacterium bovis
GGVAVIKAGA

SEQ ID NO: 1777 - protein, 9 aa, Human alphaherpesvirus sp.
GILGFVFTL

SEQ ID NO: 1778 - protein, 20 aa, Human alphaherpesvirus sp.
GNSIIHYTNINYYKDAASNS

SEQ ID NO: 1779 - protein, 10 aa, Mycobacterium bovis
GVTLLQAAPT

SEQ ID NO: 1780 - protein, 13 aa, Homo sapiens
IAFTSEHSHFSLK

SEQ ID NO: 1781 - protein, 9 aa, Human alphaherpesvirus sp.
ILRGSVAHK

SEQ ID NO: 1782 - protein, 10 aa, Mycobacterium bovis
IVAGGGVTLL

SEQ ID NO: 1783 - protein, 10 aa, Homo sapiens
IVLGGGCALL

SEQ ID NO: 1784 - protein, 9 aa, Human alphaherpesvirus sp.
IYSTVASSL

SEQ ID NO: 1785 - protein, 9 aa, Human alphaherpesvirus sp.
KAVYNFATC

SEQ ID NO: 1786 - protein, 14 aa, Human alphaherpesvirus sp.
KEVPALTAVETGAT

SEQ ID NO: 1787 - protein, 12 aa, Human alphaherpesvirus sp.
KILPEVKEKHEF

SEQ ID NO: 1788 - protein, 10 aa, Mycobacterium bovis
LAKLAGGVAV

SEQ ID NO: 1789 - protein, 10 aa, Homo sapiens
LAKLSDGVAV

SEQ ID NO: 1790 - protein, 20 aa, Mus musculus
LVLNRLKVGLQVVAVKAPGF

SEQ ID NO: 1791 - protein, 20 aa, Human alphaherpesvirus sp.
MGAQVSTQKTGAHETSLSAS

SEQ ID NO: 1792 - protein, 20 aa, Homo sapiens
NMYAMMIARFKMFPEVKEKG

SEQ ID NO: 1793 - protein, 30 aa, Human alphaherpesvirus sp.
NYYKDAASNSANRQDFTQDPSKFTEPVKDV

SEQ ID NO: 1794 - protein, 13 aa, Human alphaherpesvirus sp.
PKYVKQNTLKLAT

SEQ ID NO: 1795 - protein, 15 aa, Mycobacterium sp.
PYILLVSSKVSTVKD

SEQ ID NO: 1796 - protein, 14 aa, Clostridium tetani
QYIKANSKFIGITE

SEQ ID NO: 1797 - protein, 11 aa, Human alphaherpesvirus sp.
SFERFEIFPKE

SEQ ID NO: 1798 - protein, 15 aa, Mus musculus
SHLVEALYLVCGERG

SEQ ID NO: 1799 - protein, 8 aa, Gallus gallus
SIINFEKL

SEQ ID NO: 1800 - protein, 19 aa, Human alphaherpesvirus sp.
SKFTEPVKDVMIKSLPALN

SEQ ID NO: 1801 - protein, 15 aa, Mus musculus
TYEIAPVFVLLEYVT

SEQ ID NO: 1802 - protein, 24 aa, Mycobacterium bovis
VAGGGVTLLQAAPTLDELKLEGDE

SEQ ID NO: 1803 - protein, 24 aa, Homo sapiens
VLGGGVALLRVIPALDSLTPANED

SEQ ID NO: 1804 - protein, 20 aa, Human alphaherpesvirus sp.
AFGHSDAACWGFPTDTVMSV

SEQ ID NO: 1805 - protein, 20 aa, Homo sapiens
EIIKRTLKIPAMTIAKNAGV

SEQ ID NO: 1806 - protein, 20 aa, Homo sapiens
GEVIVTKDDAMLLKGKGDKA

SEQ ID NO: 1807 - protein, 20 aa, Homo sapiens
IVLGGGCALLRCIPALDSLT

SEQ ID NO: 1808 - protein, 20 aa, Homo sapiens
KFGADARALMLQGVDLLADA

SEQ ID NO: 1809 - protein, 20 aa, Homo sapiens
LVIIAEDVDGEALSTLVLNR

SEQ ID NO: 1810 - protein, 21 aa, Human alphaherpesvirus sp.
PTDVSCEGLGAWVPTAPCARI

SEQ ID NO: 1811 - protein, 9 aa, Homo sapiens
VMAPRTVLL

SEQ ID NO: 1812 - protein, 19 aa, Homo sapiens
PGSGFWSFGSEDGSGDSEN

SEQ ID NO: 1813 - protein, 9 aa, Homo sapiens
ALWMRLLPL

SEQ ID NO: 1814 - protein, 9 aa, Homo sapiens
FLFAVGFYL

SEQ ID NO: 1815 - protein, 9 aa, Homo sapiens
FLIVLSVAL

SEQ ID NO: 1816 - protein, 9 aa, Homo sapiens
FLWSVFMLI

SEQ ID NO: 1817 - protein, 26 aa, Homo sapiens
FWYIPPSLRTLEDNEERMSRLSKVAP

SEQ ID NO: 1818 - protein, 13 aa, Homo sapiens
GAHGDTTPEYQDL

SEQ ID NO: 1819 - protein, 10 aa, Homo sapiens
GIVEQCCTSI

SEQ ID NO: 1820 - protein, 9 aa, Homo sapiens
HLVEALYLV

SEQ ID NO: 1821 - protein, 34 aa, Homo sapiens
HTNVCFWYIPPSLRTLEDNEERMSRLSKVAPVIK

SEQ ID NO: 1822 - protein, 13 aa, Homo sapiens
KERLAALGPEGAH

SEQ ID NO: 1823 - protein, 23 aa, Homo sapiens
KERLAALGPEGAHGDTTPEYQDL

SEQ ID NO: 1824 - protein, 9 aa, Homo sapiens
KLQVFLIVL

SEQ ID NO: 1825 - protein, 9 aa, Homo sapiens
LLPPLLEHL

SEQ ID NO: 1826 - protein, 6 aa, Homo sapiens
MASPGS

SEQ ID NO: 1827 - protein, 20 aa, Homo sapiens
MASPGSGFWSFGSEDGSGDS

SEQ ID NO: 1828 - protein, 13 aa, Homo sapiens
NFFRMVISNPAAT

SEQ ID NO: 1829 - protein, 13 aa, unidentified
  REGION 1..13: note = epitope involved in diabetes
NFIRMVISNPAAT

SEQ ID NO: 1830 - protein, 13 aa, unidentified
  REGION 1..13: note = epitope involved in diabetes
QPLALEGSLQSRG

SEQ ID NO: 1831 - protein, 9 aa, Homo sapiens
RLLCALTSL

SEQ ID NO: 1832 - protein, 15 aa, Homo sapiens
RTLEDNEERMSRLSK

SEQ ID NO: 1833 - protein, 9 aa, Homo sapiens
SLAAGVKLL

SEQ ID NO: 1834 - protein, 10 aa, Homo sapiens
SLQKRGIVEQ

SEQ ID NO: 1835 - protein, 9 aa, Homo sapiens
SLQPLALEG

SEQ ID NO: 1836 - protein, 15 aa, Homo sapiens
SLQPLALEGSLQKRG

SEQ ID NO: 1837 - protein, 15 aa, unidentified
  REGION 1..15: note = epitope involved in diabetes
SLQPLALEGSLQSRG

SEQ ID NO: 1838 - protein, 9 aa, Homo sapiens
SLSPLQAEL

SEQ ID NO: 1839 - protein, 9 aa, Homo sapiens
SLYQLENYC

SEQ ID NO: 1840 - skipped

SEQ ID NO: 1841 - protein, 585 aa, Homo sapiens
MASPGSGFWSFGSEDGSGDSENPGTARAWCQVAQKFTGGIGNKLCALLYGDAEKPAESGGSQPPRAAARKAACACDQKPCSCSKVDVNYAFLHATDLLPACDGERPTLAFLQDVMNILLQYVVKSFDRSTKVIDFHYPNELLQEYNWELADQPQNLEEILMHCQTTLKYAIKTGHPRYFNQLSTGLDMVGLAADWLTSTANTNMFTYEIAPVFVLLEYVTLKKMREIIGWPGGSGDGIFSPGGAISNMYAMMIARFKMFPEVKEKGMAALPRLIAFTSEHSHFSLKKGAAALGIGTDSVILIKCDERGKMIPSDLERRILEAKQKGFVPFLVSATAGTTVYGAFDPLLAVADICKKYKIWMHVDAAWGGGLLMSRKHKWKLSGVERANSVTWNPHKMMGVPLQCSALLVREEGLMQNCNQMHASYLFQQDKHYDLSYDTGDKALQCGRHVDVFKLWLMWRAKGTTGFEAHVDKCLELAEYLYNIIKNREGYEMVFDGKPQHTNVCFWYIPPSLRTLEDNEERMSRLSKVAPVIKARMMEYGTTMVSYQPLGDKVNFFRMVISNPAATHQDIDFLIEEIERLGQDL

SEQ ID NO: 1842 - protein, 14 aa, Homo sapiens
AFIEFKADEKKEDE

SEQ ID NO: 1843 - protein, 15 aa, Homo sapiens
CFWYIPPSLRTLEDN

SEQ ID NO: 1844 - protein, 15 aa, Homo sapiens
ERMSRLSKVAPVIKA

SEQ ID NO: 1845 - protein, 18 aa, Bos taurus
FKADEKKFWGKYLYEIAR

SEQ ID NO: 1846 - protein, 33 aa, Homo sapiens
NMYAMMIARFKMFPEVKEKGMAALPRLIAFTSE

SEQ ID NO: 1847 - protein, 20 aa, Homo sapiens
SRLSKVAPVIKARMMEYGTT

SEQ ID NO: 1848 - protein, 41 aa, Homo sapiens
VSYQPLGDKVNFFRMVISNPAATHQDIDFLIEEIERLGQDL

SEQ ID NO: 1849 - protein, 20 aa, Homo sapiens
AEDEVQRERVSAKNALESYA

SEQ ID NO: 1850 - protein, 20 aa, Homo sapiens
AEKDEFEHKRKELEQVCNPI

SEQ ID NO: 1851 - protein, 20 aa, Homo sapiens
AGGVMTALIKRNSTIPTKQT

SEQ ID NO: 1852 - protein, 10 aa, Homo sapiens
AKSKNHTTHN

SEQ ID NO: 1853 - protein, 9 aa, Homo sapiens
ALTAVAEEV

SEQ ID NO: 1854 - protein, 12 aa, Homo sapiens
AQVATISANGDK

SEQ ID NO: 1855 - protein, 12 aa, Homo sapiens
AVADICKKYKIW

SEQ ID NO: 1856 - protein, 20 aa, Homo sapiens
DGVTVAKSIDLKDKYKNIGA

SEQ ID NO: 1857 - protein, 31 aa, Homo sapiens
DKVNFFRMVISNPAATHQDIDFLIEEIERLG

SEQ ID NO: 1858 - protein, 20 aa, Homo sapiens
DTERLIGDAAKNQVALNPQN

SEQ ID NO: 1859 - protein, 16 aa, Homo sapiens
EDLQVGQVELGGGPGA

SEQ ID NO: 1860 - protein, 20 aa, Mus musculus
EEIAQVATISANGDKDIGNI

SEQ ID NO: 1861 - protein, 20 aa, Homo sapiens
EEIAQVATISANGDKEIGNI

SEQ ID NO: 1862 - protein, 9 aa, Homo sapiens
FLQDVMNIL

SEQ ID NO: 1863 - protein, 16 aa, Homo sapiens
FYTPKTRREAEDLQVG

SEQ ID NO: 1864 - protein, 18 aa, Homo sapiens
GAGSLQPLALEGSLQKRG

SEQ ID NO: 1865 - protein, 20 aa, Homo sapiens
GLNVLRIINEPTAAAIAYGL

SEQ ID NO: 1866 - protein, 10 aa, Homo sapiens
GSGPTIEEVD

SEQ ID NO: 1867 - protein, 10 aa, Homo sapiens
HLCGSHLVEA

SEQ ID NO: 1868 - protein, 16 aa, Homo sapiens
HLVEALYLVCGERGFF

SEQ ID NO: 1869 - protein, 20 aa, Homo sapiens
IAYGLDRTGKGERNVLIFDL

SEQ ID NO: 1870 - protein, 15 aa, Homo sapiens
IDFLIEEIERLGQDL

SEQ ID NO: 1871 - protein, 20 aa, Homo sapiens
IPPSLRTLEDNEERMSRLSK

SEQ ID NO: 1872 - protein, 20 aa, Homo sapiens
KANKITITNDKGRLSKEEIE

SEQ ID NO: 1873 - protein, 20 aa, Homo sapiens
KAPGFGDNRKNQLKDMAIAT

SEQ ID NO: 1874 - protein, 20 aa, Homo sapiens
KEEIERMVQEAEKYKAEDEV

SEQ ID NO: 1875 - protein, 15 aa, Homo sapiens
KKGAAALGIGTDSVI

SEQ ID NO: 1876 - protein, 12 aa, Homo sapiens
KKYKIWMHVDAA

SEQ ID NO: 1877 - protein, 12 aa, Homo sapiens
KLCALLYGDAEK

SEQ ID NO: 1878 - protein, 20 aa, Homo sapiens
KRTLSSSTQASLEIDSLFEG

SEQ ID NO: 1879 - protein, 18 aa, Homo sapiens
KVNFFRMVISNPAATHQD

SEQ ID NO: 1880 - protein, 20 aa, Homo sapiens
LESYAFNMKSAVEDEGLKGK

SEQ ID NO: 1881 - protein, 15 aa, Homo sapiens
LKKMREIIGWPGGSG

SEQ ID NO: 1882 - protein, 20 aa, Homo sapiens
LLADAVAVTMGPKGRTVIIE

SEQ ID NO: 1883 - protein, 20 aa, Homo sapiens
LLLLDVAPLSLGLETAGGVM

SEQ ID NO: 1884 - protein, 9 aa, Homo sapiens
LLQEYNWEL

SEQ ID NO: 1885 - protein, 9 aa, Mus musculus
LYLVCGERG

SEQ ID NO: 1886 - protein, 20 aa, Homo sapiens
MAKAAAVGIDLGTTYSCVGV

SEQ ID NO: 1887 - protein, 12 aa, Homo sapiens
MASPGSGFWSFG

SEQ ID NO: 1888 - protein, 20 aa, Homo sapiens
MLRLPTVFRQMRPVSRVLAP

SEQ ID NO: 1889 - protein, 20 aa, Homo sapiens
NDQGNRTTPSYVAFTDTERL

SEQ ID NO: 1890 - protein, 20 aa, Homo sapiens
NEEAGDGTTTATVLARSIAK

SEQ ID NO: 1891 - protein, 14 aa, Homo sapiens
NILLQYVVKSFDRS

SEQ ID NO: 1892 - protein, 13 aa, Homo sapiens
NPAATHQDIDFLI

SEQ ID NO: 1893 - protein, 20 aa, Homo sapiens
NPVEIRRGVMLAVDAVIAEL

SEQ ID NO: 1894 - protein, 12 aa, Homo sapiens
PAESGGSQPPRA

SEQ ID NO: 1895 - protein, 20 aa, Homo sapiens
PAPGVPQIEVTFDIDANGIL

SEQ ID NO: 1896 - protein, 20 aa, Homo sapiens
PFQVINDGDKPKVQVSYKGE

SEQ ID NO: 1897 - protein, 20 aa, Homo sapiens
PGPGGFGAQGPKGGSGSGPT

SEQ ID NO: 1898 - protein, 20 aa, Homo sapiens
PTKQTQIFTTYSDNQPGVLI

SEQ ID NO: 1899 - protein, 13 aa, unidentified
  REGION 1..13: note = epitope involved in diabetes
PVQLSNQWHVVGA

SEQ ID NO: 1900 - protein, 20 aa, Homo sapiens
QDAYVLLSEKKISSIQSIVP

SEQ ID NO: 1901 - protein, 21 aa, Homo sapiens
QSIVPALEIANAHRKPLVIIA

SEQ ID NO: 1902 - protein, 20 aa, Homo sapiens
RFEELCSDLFRSTLEPVEKA

SEQ ID NO: 1903 - protein, 20 aa, Homo sapiens
RKGVITVKDGKTLNDELEII

SEQ ID NO: 1904 - protein, 10 aa, Homo sapiens
RMMEYGTTMV

SEQ ID NO: 1905 - protein, 20 aa, Homo sapiens
RSIAKEGFEKISKGANPVEI

SEQ ID NO: 1906 - protein, 20 aa, Homo sapiens
RVLAPHLTRAYAKDVKFGAD

SEQ ID NO: 1907 - protein, 20 aa, Homo sapiens
SCVGVFQHGKVEIIANDQGN

SEQ ID NO: 1908 - protein, 10 aa, Homo sapiens
SLYHVYEVNL

SEQ ID NO: 1909 - protein, 12 aa, Homo sapiens
TARAWCQVAQKF

SEQ ID NO: 1910 - protein, 20 aa, Homo sapiens
THLGGEDFDNRLVNHFVEEF

SEQ ID NO: 1911 - protein, 9 aa, Homo sapiens
TIADFWQMV

SEQ ID NO: 1912 - protein, 20 aa, Homo sapiens
TIDDGIFEVKATAGDTHLGG

SEQ ID NO: 1913 - protein, 20 aa, Homo sapiens
TVIIEQSWGSPKVTKDGVTV

SEQ ID NO: 1914 - protein, 10 aa, Homo sapiens
VCGERGFFYT

SEQ ID NO: 1915 - protein, 20 aa, Homo sapiens
VCNPIISGLYQGAGGPGPGG

SEQ ID NO: 1916 - protein, 20 aa, Homo sapiens
VDKCLELAEYLYNIIKNREG

SEQ ID NO: 1917 - protein, 13 aa, Homo sapiens
VEQCCTSICSLYQ

SEQ ID NO: 1918 - protein, 20 aa, Homo sapiens
VIAELKKQSKPVTTPEEIAQ

SEQ ID NO: 1919 - protein, 9 aa, Homo sapiens
VIVMLTPLV

SEQ ID NO: 1920 - protein, 24 aa, unidentified
  REGION 1..24: note = epitope involved in diabetes
VLGGGVLLLRVIPALDSLTPANED

SEQ ID NO: 1921 - protein, 10 aa, Homo sapiens
VMNILLQYVV

SEQ ID NO: 1922 - protein, 20 aa, Homo sapiens
VNMVEKGIIDPTKVVRTALL

SEQ ID NO: 1923 - protein, 20 aa, Homo sapiens
VQKLLQDFFNGRDLNKSINP

SEQ ID NO: 1924 - protein, 20 aa, Homo sapiens
VTDALNATRAAVEEGIVLGG

SEQ ID NO: 1925 - protein, 9 aa, Mus musculus
VYLKTNVFL

SEQ ID NO: 1926 - protein, 13 aa, Homo sapiens
AKGTTGFEAHVDK

SEQ ID NO: 1927 - protein, 10 aa, Homo sapiens
ALWGPDPAAA

SEQ ID NO: 1928 - protein, 15 aa, Homo sapiens
FDRSTKVIDFHYPNE

SEQ ID NO: 1929 - protein, 20 aa, Homo sapiens
FFRMVISNPAATHQDIDFLI

SEQ ID NO: 1930 - protein, 13 aa, Homo sapiens
FFYTPKTRREAED

SEQ ID NO: 1931 - protein, 17 aa, Homo sapiens
FYTPKTRREAEDLQVGQ

SEQ ID NO: 1932 - protein, 17 aa, Homo sapiens
GGPGAGSLQPLALEGSL

SEQ ID NO: 1933 - protein, 12 aa, Homo sapiens
GHPRYFNQLSTG

SEQ ID NO: 1934 - protein, 20 aa, Homo sapiens
IPPSLRYLEDNEERMSRLSK

SEQ ID NO: 1935 - protein, 20 aa, Mus musculus
KGDKAHIEKRIQEITEQLDI

SEQ ID NO: 1936 - protein, 15 aa, Homo sapiens
KHYDLSYDTGDKALQ

SEQ ID NO: 1937 - protein, 15 aa, Homo sapiens
KRGIVEQCCTSICSL

SEQ ID NO: 1938 - protein, 9 aa, Homo sapiens
LALEGSLQK

SEQ ID NO: 1939 - protein, 17 aa, Homo sapiens
LALWGPDPAAAFVNQHL

SEQ ID NO: 1940 - protein, 17 aa, Homo sapiens
LLPLLALLALWGPDPAA

SEQ ID NO: 1941 - protein, 9 aa, Homo sapiens
LNIDLLWSV

SEQ ID NO: 1942 - protein, 14 aa, Homo sapiens
LPRLIAFTSEHSHF

SEQ ID NO: 1943 - protein, 15 aa, Homo sapiens
LPRLIAFTSEHSHFS

SEQ ID NO: 1944 - protein, 17 aa, Homo sapiens
LVEALYLVCGERGFFYT

SEQ ID NO: 1945 - protein, 10 aa, unidentified
  REGION 1..10: note = epitope involved in diabetes
LWEIEFAKQL

SEQ ID NO: 1946 - protein, 16 aa, Homo sapiens
MALWMRLLPLLALLAL

SEQ ID NO: 1947 - protein, 20 aa, Homo sapiens
NWELADQPQNLEEILMHCQT

SEQ ID NO: 1948 - protein, 17 aa, Homo sapiens
PAAAFVNQHLCGSHLVE

SEQ ID NO: 1949 - protein, 14 aa, Homo sapiens
PGSGFWSFGSEDGS

SEQ ID NO: 1950 - protein, 17 aa, Homo sapiens
QHLCGSHLVEALYLVCG

SEQ ID NO: 1951 - protein, 17 aa, Homo sapiens
REAEDLQVGQVELGGGP

SEQ ID NO: 1952 - protein, 12 aa, Homo sapiens
RLIAFTSEHSHF

SEQ ID NO: 1953 - protein, 9 aa, Homo sapiens
RLLPLLALL

SEQ ID NO: 1954 - protein, 15 aa, Homo sapiens
RMMEYGTTMVSYQPL

SEQ ID NO: 1955 - protein, 20 aa, Mus musculus
RTALLDAAGVASLLTTAEAV

SEQ ID NO: 1956 - protein, 20 aa, Mus musculus
TAEAVVTEIPKEEKDPGMGA

SEQ ID NO: 1957 - protein, 20 aa, Homo sapiens [sequence omitted]

SEQ ID NO: 1958 - protein, 17 aa, Homo sapiens
VCGERGFFYTPKTRREA

SEQ ID NO: 1959 - protein, 17 aa, Homo sapiens
VGQVELGGGPGAGSLQP

SEQ ID NO: 1960 - protein, 9 aa, Homo sapiens
VLFGLGFAI

SEQ ID NO: 1961 - protein, 24 aa, Homo sapiens
VLGGGCALLRCIPALDSLTPANED

SEQ ID NO: 1962 - protein, 8 aa, Homo sapiens
WGPDPAAA

SEQ ID NO: 1963 - protein, 582 aa, Homo sapiens
PGSGFWSFGSEDGSGDSENPGTARAWCQVAQKFTGGIGNKLCALLYGDAEKPAESGGSQPPRAAARKAACACDQKPCSCSKVDVNYAFLHATDLLPACDGERPTLAFLQDVMNILLQYVVKSFDRSTKVIDFHYPNELLQEYNWELADQPQNLEEILMHCQTTLKYAIKTGHPRYFNQLSTGLDMVGLAADWLTSTANTNMFTYEIAPVFVLLEYVTLKKMREIIGWPGGSGDGIFSPGGAISNMYAMMIARFKMFPEVKEKGMAALPRLIAFTSEHSHFSLKKGAAALGIGTDSVILIKCDERGKMIPSDLERRILEAKQKGFVPFLVSATAGTTVYGAFDPLLAVADICKKYKIWMHVDAAWGGGLLMSRKHKWKLSGVERANSVTWNPHKMMGVPLQCSALLVREEGLMQNCNQMHASYLFQQDKHYDLSYDTGDKALQCGRHVDVFKLWLMWRAKGTTGFEAHVDKCLELAEYLYNIIKNREGYEMVFDGKPQHTNVCFWYIPPSLRTLEDNEERMSRLSKVAPVIKARMMEYGTTMVSYQPLGDKVNFFRMVISNPAATHQDIDFLIEEIERLGQDL

SEQ ID NO: 1964 - protein, 11 aa, Homo sapiens
AFTSEHSHFSL

SEQ ID NO: 1965 - protein, 12 aa, Homo sapiens
AFTSEHSHFSLK

SEQ ID NO: 1966 - protein, 17 aa, Homo sapiens
AGSLQPLALEGSLQKRG

SEQ ID NO: 1967 - protein, 9 aa, Homo sapiens
ALYLVCGER

SEQ ID NO: 1968 - protein, 18 aa, Homo sapiens
ANTNMFTYEIAPVFVLLE

SEQ ID NO: 1969 - protein, 20 aa, Homo sapiens
ATHQDIDFLIEEIERLGQDL

SEQ ID NO: 1970 - protein, 9 aa, unidentified
  REGION 1..9: note = epitope involved in diabetes
AYNKANWFL

SEQ ID NO: 1971 - protein, 16 aa, Homo sapiens
CCTSICSLYQLENYCN

SEQ ID NO: 1972 - protein, 11 aa, unidentified
  REGION 1..11: note = epitope involved in diabetes
CHAVKVGNPSC

SEQ ID NO: 1973 - protein, 11 aa, unidentified
  REGION 1..11: note = epitope involved in diabetes
CPRDLNGKSGC

SEQ ID NO: 1974 - protein, 20 aa, Homo sapiens
EAKQKGFVPFLVSATAGTTV

SEQ ID NO: 1975 - protein, 20 aa, Homo sapiens
ERMSRLSKVAPVIKARMMEY

SEQ ID NO: 1976 - protein, 20 aa, Homo sapiens
EVKEKGMAALPRLIAFTSEH

SEQ ID NO: 1977 - protein, 11 aa, Homo sapiens
FKMFPEVKEKG

SEQ ID NO: 1978 - protein, 10 aa, Homo sapiens
FTSEHSHFSL

SEQ ID NO: 1979 - protein, 17 aa, Homo sapiens
FVNQHLCGSHLVEALYL

SEQ ID NO: 1980 - protein, 13 aa, Homo sapiens
FWYIPPSLRTLED

SEQ ID NO: 1981 - protein, 20 aa, Homo sapiens
GDKVNFFRMVISNPAATHQD

SEQ ID NO: 1982 - protein, 17 aa, Homo sapiens
GERGFFYTPKTRREAED

SEQ ID NO: 1983 - protein, 21 aa, Homo sapiens
GGGLLMSRKHKWKLSGVERAN

SEQ ID NO: 1984 - protein, 15 aa, Homo sapiens
GIVEQCCTSICSLYQ

SEQ ID NO: 1985 - protein, 19 aa, Homo sapiens
GLMQNCNQMHASYLFQQDK

SEQ ID NO: 1986 - protein, 17 aa, Homo sapiens
GQVELGGGPGAGSLQPL

SEQ ID NO: 1987 - protein, 15 aa, Homo sapiens
GSHLVEALYLVCGER

SEQ ID NO: 1988 - protein, 17 aa, Homo sapiens
GSLQKRGIVEQCCTSIC

SEQ ID NO: 1989 - protein, 20 aa, Homo sapiens
GTTMVSYQPLGDKVNFFRMV

SEQ ID NO: 1990 - protein, 15 aa, Homo sapiens
HLCGSHLVEALYLVC

SEQ ID NO: 1991 - protein, 15 aa, Homo sapiens
HLVEALYLVCGERGF

SEQ ID NO: 1992 - protein, 20 aa, Homo sapiens
HTNVCFWYIPPSLRTLEDNE

SEQ ID NO: 1993 - protein, 14 aa, unidentified
  REGION 1..14: note = epitope involved in diabetes
IMEQCFEIGCPATN

SEQ ID NO: 1994 - protein, 16 aa, Homo sapiens
IPPSLRTLEDNEERMS

SEQ ID NO: 1995 - protein, 20 aa, Homo sapiens
ISNPAATHQDIDFLIEEIER

SEQ ID NO: 1996 - protein, 9 aa, unidentified
  REGION 1..9: note = epitope involved in diabetes
KYNKAAWFL

SEQ ID NO: 1997 - protein, 9 aa, unidentified
  REGION 1..9: note = epitope involved in diabetes
KYNKANAFL

SEQ ID NO: 1998 - protein, 9 aa, unidentified
  REGION 1..9: note = epitope involved in diabetes
KYNKANWAL

SEQ ID NO: 1999 - protein, 9 aa, unidentified
  REGION 1..9: note = epitope involved in diabetes
KYNKANWFL

SEQ ID NO: 2000 - protein, 17 aa, Homo sapiens
LCGSHLVEALYLVCGER

SEQ ID NO: 2001 - protein, 14 aa, unidentified
  REGION 1..14: note = epitope involved in diabetes
LMEPCYAWGCTGPK

SEQ ID NO: 2002 - protein, 15 aa, Homo sapiens
LVEALYLVCGERGFF

SEQ ID NO: 2003 - protein, 15 aa, Homo sapiens
LYLVCGERGFFYTPK

SEQ ID NO: 2004 - protein, 15 aa, Homo sapiens
MIARFKMFPEVKEKG

SEQ ID NO: 2005 - protein, 20 aa, Homo sapiens
MMIARFKMFPEVKEKGMAAL

SEQ ID NO: 2006 - protein, 10 aa, Homo sapiens
MYAMMIARFK

SEQ ID NO: 2007 - protein, 12 aa, Homo sapiens
MYAMMIARFKMF

SEQ ID NO: 2008 - protein, 14 aa, unidentified
  REGION 1..14: note = epitope involved in diabetes
NDSQCWKLGCIAEK

SEQ ID NO: 2009 - protein, 12 aa, Homo sapiens
NILLQYVVKSFD

SEQ ID NO: 2010 - protein, 14 aa, unidentified
  REGION 1..14: note = epitope involved in diabetes
NPEDCFKTGCNSPT

SEQ ID NO: 2011 - protein, 12 aa, Homo sapiens
NYAFLHATDLLP

SEQ ID NO: 2012 - protein, 20 aa, Homo sapiens
PSLRTLEDNEERMSRLSKVA

SEQ ID NO: 2013 - protein, 20 aa, Homo sapiens
PVIKARMMEYGTTMVSYQPL

SEQ ID NO: 2014 - protein, 15 aa, Homo sapiens
QHLCGSHLVEALYLV

SEQ ID NO: 2015 - protein, 9 aa, Homo sapiens
RFKMFPEVK

SEQ ID NO: 2016 - protein, 10 aa, Homo sapiens
RFKMFPEVKE

SEQ ID NO: 2017 - protein, 11 aa, Homo sapiens
RFKMFPEVKEK

SEQ ID NO: 2018 - protein, 10 aa, Homo sapiens
SHLVEALYLV

SEQ ID NO: 2019 - protein, 14 aa, unidentified
  REGION 1..14: note = epitope involved in diabetes
SNVECDGLNCDWII

SEQ ID NO: 2020 - protein, 16 aa, Homo sapiens
SPSLWEIEFAKQLASV

SEQ ID NO: 2021 - protein, 16 aa, unidentified
  REGION 1..16: note = epitope involved in diabetes
SPSLWEIEIAKQLASV

SEQ ID NO: 2022 - protein, 17 aa, Homo sapiens
TRREAEDLQVGQVELGG

SEQ ID NO: 2023 - protein, 9 aa, Homo sapiens
TSEHSHFSL

SEQ ID NO: 2024 - protein, 15 aa, Homo sapiens
VEALYLVCGERGFFY

SEQ ID NO: 2025 - protein, 9 aa, Homo sapiens
VMNILLQYV

SEQ ID NO: 2026 - protein, 20 aa, Homo sapiens
YEMVFDGKPQHTNVCFWYIP

SEQ ID NO: 2027 - protein, 15 aa, Homo sapiens
YLVCGERGFFYTPKT

SEQ ID NO: 2028 - protein, 979 aa, Homo sapiens
MRRPRRPGGLGGSGGLRLLLCLLLLSSRPGGCSAVSAHGCLFDRRLCSHLEVCIQDGLFGQCQVGVGQARPLLQVTSPVLQRLQGVLRQLMSQGLSWHDDLTQYVISQEMERIPRLRPPEPRPRDRSGLAPKRPGPAGELLLQDIPTGSAPAAQHRLPQPPVGKGGAGASSSLSPLQAELLPPLLEHLLLPPQPPHPSLSYEPALLQPYLFHQFGSRDGSRVSEGSPGMVSVGPLPKAEAPALFSRTASKGIFGDHPGHSYGDLPGPSPAQLFQDSGLLYLAQELPAPSRARVPRLPEQGSSSRAEDSPEGYEKEGLGDRGEKPASPAVQPDAALQRLAAVLAGYGVELRQLTPEQLSTLLTLLQLLPKGAGRNPGGVVNVGADIKKTMEGPVEGRDTAELPARTSPMPGHPTASPTSSEVQQVPSPVSSEPPKAARPPVTPVLLEKKSPLGQSQPTVAGQPSARPAAEEYGYIVTDQKPLSLAAGVKLLEILAEHVHMSSGSFINISVVGPALTFRIRHNEQNLSLADVTQQAGLVKSELEAQTGLQILQTGVGQREEAAAVLPQTAHSTSPMRSVLLTLVALAGVAGLLVALAVALCVRQHARQQDKERLAALGPEGAHGDTTFEYQDLCRQHMATKSLFNRAEGPPEPSRVSSVSSQFSDAAQASPSSHSSTPSWCEEPAQANMDISTGHMILAYMEDHLRNRDRLAKEWQALCAYQAEPNTCATAQGEGNIKKNRHPDFLPYDHARIKLKVESSPSRSDYINASPIIEHDPRMPAYIATQGPLSHTIADFWQMVWESGCTVIVMLTPLVEDGVKQCDRYWPDEGASLYHVYEVNLVSEHIWCEDFLVRSFYLKNVQTQETRTLTQFHFLSWPAEGTPASTRPLLDFRRKVNKCYRGRSCPIIVHCSDGAGRTGTYILIDMVLNRMAKGVKEIDIAATLEHVRDQRPGLVRSKDQFEFALTAVAEEVNAILKALPQ

SEQ ID NO: 2029 - protein, 20 aa, Homo sapiens
AALGIGTDSVILIKCDERGK

SEQ ID NO: 2030 - protein, 12 aa, Homo sapiens
AFIKATGKKEDE

SEQ ID NO: 2031 - protein, 11 aa, Mus musculus
APVIKARMMEY

SEQ ID NO: 2032 - protein, 13 aa, Homo sapiens
CAYQAEPNTCATA

SEQ ID NO: 2033 - protein, 13 aa, Homo sapiens
CTVIVMLTPLVED

SEQ ID NO: 2034 - protein, 13 aa, Homo sapiens
DQFEFALTAVAEE

SEQ ID NO: 2035 - protein, 15 aa, unidentified
  REGION 1..15: note = epitope involved in diabetes
EKAHRPIWARMDAKK

SEQ ID NO: 2036 - protein, 20 aa, Homo sapiens
EYVTLKKMREIIGWPGGSGD

SEQ ID NO: 2037 - protein, 15 aa, Bos taurus
FKADEKKFWGKYLYE

SEQ ID NO: 2038 - protein, 19 aa, Homo sapiens
FYLKNVQTQETRTLTQFHF

SEQ ID NO: 2039 - protein, 20 aa, Homo sapiens
GMAALPRLIAFTSEHSHFSL

SEQ ID NO: 2040 - protein, 13 aa, Homo sapiens
GSFINISVVGPAL

SEQ ID NO: 2041 - protein, 18 aa, Homo sapiens
GSLQPLALEGSLQKRGIV

SEQ ID NO: 2042 - protein, 20 aa, Mus musculus
HTPGVHMASLSVYLKTNVFL

SEQ ID NO: 2043 - protein, 15 aa, Homo sapiens
IKARMMEYGTTMVSY

SEQ ID NO: 2044 - protein, 20 aa, Homo sapiens
IKLKVESSPSRSDYINASPI

SEQ ID NO: 2045 - protein, 9 aa, unidentified
  REGION 1..9: note = epitope involved in diabetes
KYNKANVFL

SEQ ID NO: 2046 - protein, 23 aa, Homo sapiens
LAKEWQALCAYQAEPNTCATAQG

SEQ ID NO: 2047 - protein, 15 aa, Homo sapiens
LAKLSDGVAVLKVGG

SEQ ID NO: 2048 - protein, 13 aa, Homo sapiens
LEILAEHVHMSSG

SEQ ID NO: 2049 - protein, 19 aa, Mus musculus
LHRSGVLIIHHLQEDYRTY

SEQ ID NO: 2050 - protein, 20 aa, Homo sapiens
LYHVYEVNLVSEHIWCEDFL

SEQ ID NO: 2051 - protein, 17 aa, Homo sapiens
MASPGSGFWSFGSEDGS

SEQ ID NO: 2052 - protein, 37 aa, Homo sapiens
MGILKLQVFLIVLSVALNHLKATPIESHQVEKRKCNT

SEQ ID NO: 2053 - protein, 15 aa, Homo sapiens
MVFDGKPQHTNVCFW

SEQ ID NO: 2054 - protein, 21 aa, Homo sapiens
MVWESGCTVIVMLTPLVEDGV

SEQ ID NO: 2055 - protein, 9 aa, unidentified
  REGION 1..9: note = epitope involved in diabetes
NRVAPNVRQ

SEQ ID NO: 2056 - protein, 13 aa, Homo sapiens
PAYIATQGPLSHT

SEQ ID NO: 2057 - protein, 15 aa, Mus musculus
PHLVEALYLVCGERG

SEQ ID NO: 2058 - protein, 13 aa, Homo sapiens
PSLSYEPALLQPY

SEQ ID NO: 2059 - protein, 15 aa, Mus musculus
PVIKARMMEYGTTMV

SEQ ID NO: 2060 - protein, 13 aa, Homo sapiens
RSVLLTLVALAGV

SEQ ID NO: 2061 - protein, 20 aa, Homo sapiens
SEHIWCEDFLVRSFYLKNVQ

SEQ ID NO: 2062 - protein, 15 aa, Mus musculus
SHLVEALYLVAGERG

SEQ ID NO: 2063 - protein, 21 aa, Homo sapiens
SKDQFEFALTAVAEEVNAILK

SEQ ID NO: 2064 - protein, 13 aa, Homo sapiens
SLYHVYEVNLVSE

SEQ ID NO: 2065 - protein, 10 aa, Mus musculus
SLYQLENYCN

SEQ ID NO: 2066 - protein, 18 aa, Mus musculus
TAALSYTISRMEESSVTL

SEQ ID NO: 2067 - protein, 15 aa, Homo sapiens
TGHPRYFNQLSTGLD

SEQ ID NO: 2068 - protein, 13 aa, Mus musculus
TQYEAVATSNMQE

SEQ ID NO: 2069 - protein, 13 aa, Homo sapiens
TYILIDMVLNRMA

SEQ ID NO: 2070 - protein, 16 aa, Mus musculus
VPPSLRTLEDNEERMS

SEQ ID NO: 2071 - protein, 16 aa, Mus musculus
VPTSLRRLEQPNVAIS

SEQ ID NO: 2072 - protein, 18 aa, Homo sapiens
VSSQFSDAAQASPSSHSS

SEQ ID NO: 2073 - protein, 23 aa, Mus musculus
WYVMVTAALSYTISRMEESSVTL

SEQ ID NO: 2074 - protein, 979 aa, Homo sapiens; identical to SEQ ID NO: 2028

SEQ ID NO: 2075 - protein, 11 aa, unidentified
  REGION 1..11: note = epitope involved in diabetes
AVRPLWVRMEA

SEQ ID NO: 2076 - protein, 10 aa, Homo sapiens
DTTFEYQDLC

SEQ ID NO: 2077 - protein, 11 aa, Mus musculus
EALYLVCGERG

SEQ ID NO: 2078 - protein, 9 aa, Homo sapiens
ELAEYLYNI

SEQ ID NO: 2079 - protein, 10 aa, Homo sapiens
GAHGDTTFEY

SEQ ID NO: 2080 - protein, 7 aa, unidentified
  REGION 1..7: note = epitope involved in diabetes
GERAKRS

SEQ ID NO: 2081 - protein, 12 aa, Bos taurus
GIVEQCCASVCS

SEQ ID NO: 2082 - protein, 15 aa, Bos taurus
GIVEQCCASVCSLYQ

SEQ ID NO: 2083 - protein, 12 aa, Homo sapiens
GIVEQCCTSICS

SEQ ID NO: 2084 - protein, 23 aa, Mus musculus
GRHSAEYYNKQYLERTRAELDTA

SEQ ID NO: 2085 - protein, 9 aa, Homo sapiens
ILMHCQTTL

SEQ ID NO: 2086 - protein, 7 aa, unidentified
  REGION 1..7: note = epitope involved in diabetes
LDQRSSK

SEQ ID NO: 2087 - protein, 7 aa, unidentified
  REGION 1..7: note = epitope involved in diabetes
LDQSRLK

SEQ ID NO: 2088 - protein, 19 aa, Mus musculus
LKICGFLQRTNSLEEKSRL

SEQ ID NO: 2089 - protein, 7 aa, unidentified
  REGION 1..7: note = epitope involved in diabetes
LPGERQI

SEQ ID NO: 2090 - protein, 7 aa, unidentified
  REGION 1..7: note = epitope involved in diabetes
LPNRSQI

SEQ ID NO: 2091 - protein, 7 aa, unidentified
  REGION 1..7: note = epitope involved in diabetes
NIKSSLP

SEQ ID NO: 2092 - protein, 7 aa, unidentified
  REGION 1..7: note = epitope involved in diabetes
NPGSSLG

SEQ ID NO: 2093 - protein, 17 aa, Mus musculus
NSQPEILERTRAEVDTA

SEQ ID NO: 2094 - protein, 7 aa, unidentified
  REGION 1..7: note = epitope involved in diabetes
PDGSRLV

SEQ ID NO: 2095 - protein, 7 aa, unidentified
  REGION 1..7: note = epitope involved in diabetes
PGSRLQP

SEQ ID NO: 2096 - protein, 7 aa, unidentified
  REGION 1..7: note = epitope involved in diabetes
PGTRLQP

SEQ ID NO: 2097 - protein, 7 aa, unidentified
  REGION 1..7: note = epitope involved in diabetes
PSRLVNQ

SEQ ID NO: 2098 - protein, 12 aa, Bos taurus
QCCASVCSLYQL

SEQ ID NO: 2099 - protein, 12 aa, Homo sapiens
QCCTSICSLYQL

SEQ ID NO: 2100 - protein, 7 aa, unidentified
  REGION 1..7: note = epitope involved in diabetes
QGERSGP

SEQ ID NO: 2101 - protein, 7 aa, unidentified
  REGION 1..7: note = epitope involved in diabetes
QRSGRGP

SEQ ID NO: 2102 - protein, 15 aa, unidentified
  REGION 1..15: note = epitope involved in diabetes
SHLVEALALVAGERG

SEQ ID NO: 2103 - protein, 8 aa, Mus musculus
SHLVEALY

SEQ ID NO: 2104 - protein, 7 aa, unidentified
  REGION 1..7: note = epitope involved in diabetes
STGERIQ

SEQ ID NO: 2105 - protein, 20 aa, Homo sapiens
TNMFTYEIAPVFVLLEYVTL

SEQ ID NO: 2106 - protein, 13 aa, Bos taurus
VCGERGFFYTPKA

SEQ ID NO: 2107 - protein, 7 aa, unidentified
  REGION 1..7: note = epitope involved in diabetes
VGERGSK

SEQ ID NO: 2108 - protein, 7 aa, unidentified
  REGION 1..7: note = epitope involved in diabetes
VIQGSQL

SEQ ID NO: 2109 - protein, 7 aa, unidentified
  REGION 1..7: note = epitope involved in diabetes
VIQGSRL

SEQ ID NO: 2110 - protein, 24 aa, Mus musculus
VLGGGCALLRCIPALDSLKPANED

SEQ ID NO: 2111 - protein, 7 aa, unidentified
  REGION 1..7: note = epitope involved in diabetes
VPQQSIP

SEQ ID NO: 2112 - protein, 7 aa, unidentified
  REGION 1..7: note = epitope involved in diabetes
VRGRGSK

SEQ ID NO: 2113 - protein, 7 aa, unidentified
  REGION 1..7: note = epitope involved in diabetes
VSRSLLD

SEQ ID NO: 2114 - protein, 585 aa, Homo sapiens; identical to SEQ ID NO: 1841

SEQ ID NO: 2115 - protein, 30 aa, Homo sapiens
AAAFVNQHLCGSHLVEALYLVCGERGFFYT

SEQ ID NO: 2116 - protein, 9 aa, Mus musculus
ALIPYCVHM

SEQ ID NO: 2117 - protein, 9 aa, Mus musculus
ALSYTISRM

SEQ ID NO: 2118 - protein, 9 aa, Mus musculus
ATHFPHQVI

SEQ ID NO: 2119 - protein, 9 aa, Mus musculus
CALTSLTTM

SEQ ID NO: 2120 - protein, 9 aa, Mus musculus
CANPDWIHI

SEQ ID NO: 2121 - protein, 21 aa, Homo sapiens
CGRHVDVFKLWLMWRAKGTTG

SEQ ID NO: 2122 - protein, 9 aa, Mus musculus
CKSASIPLM

SEQ ID NO: 2123 - protein, 9 aa, Mus musculus
CQGENGTKP

SEQ ID NO: 2124 - protein, 20 aa, Homo sapiens
DERGKMIPSDLERRILEAKQ

SEQ ID NO: 2125 - protein, 9 aa, Mus musculus
DFLHRSGVL

SEQ ID NO: 2126 - protein, 12 aa, unidentified
  REGION 1..12: note = epitope involved in diabetes
DSYEIMQGRAVV

SEQ ID NO: 2127 - protein, 9 aa, Mus musculus
DYRTYYGFL

SEQ ID NO: 2128 - protein, 20 aa, Homo sapiens
EEILMHCQTTLKYAIKTGHP

SEQ ID NO: 2129 - protein, 20 aa, Homo sapiens
ERANSVTWNPHKMMGVPLQC

SEQ ID NO: 2130 - protein, 9 aa, Mus musculus
ESSVTLHRL

SEQ ID NO: 2131 - protein, 20 aa, Homo sapiens
EYGTTMVSYQPLGDKVNFFR

SEQ ID NO: 2132 - protein, 20 aa, Homo sapiens
EYLYNIIKNREGYEMVFDGK

SEQ ID NO: 2133 - protein, 9 aa, Mus musculus
FAINSEMFL

SEQ ID NO: 2134 - protein, 9 aa, Mus musculus
FEHTPGVHM

SEQ ID NO: 2135 - protein, 9 aa, Mus musculus
FGIDLLWSV

SEQ ID NO: 2136 - protein, 9 aa, Mus musculus
FLHRSGVLI

SEQ ID NO: 2137 - protein, 9 aa, Homo sapiens
FLWSVFWLI

SEQ ID NO: 2138 - protein, 9 aa, Mus musculus
GDPRNIFSI

SEQ ID NO: 2139 - protein, 9 aa, Mus musculus
GFAINSEMF

SEQ ID NO: 2140 - protein, 20 aa, Homo sapiens
GGSGDGIFSPGGAISNMYAM

SEQ ID NO: 2141 - protein, 9 aa, Mus musculus
GHAMGSSCV

SEQ ID NO: 2142 - protein, 9 aa, Mus musculus
GLVRNLGVL

SEQ ID NO: 2143 - protein, 9 aa, Mus musculus
GTKPSFRLL

SEQ ID NO: 2144 - protein, 9 aa, Mus musculus
HAEPLFYLL

SEQ ID NO: 2145 - protein, 9 aa, Mus musculus
HMASLSVYL

SEQ ID NO: 2146 - protein, 9 aa, Mus musculus
IYFPLWFQL

SEQ ID NO: 2147 - protein, 9 aa, Mus musculus
IYPNHSSPC

SEQ ID NO: 2148 - protein, 22 aa, Homo sapiens
KGTTGFEAHVDKCLELAEYLYN

SEQ ID NO: 2149 - protein, 9 aa, Mus musculus
KIPTHAEPL

SEQ ID NO: 2150 - protein, 20 aa, Homo sapiens
KTGHPRYFNQLSTGLDMVGL

SEQ ID NO: 2151 - protein, 9 aa, Mus musculus
KWCANPDWI

SEQ ID NO: 2152 - protein, 22 aa, Homo sapiens
LAFLQDVMNILLQYVVKSFDRS

SEQ ID NO: 2153 - protein, 20 aa, Homo sapiens
LEAKQKGFVPFLVSATAGTT

SEQ ID NO: 2154 - protein, 9 aa, Mus musculus
LGFAINSEM

SEQ ID NO: 2155 - protein, 20 aa, Homo sapiens
LLYGDAEKPAESGGSQPPRA

SEQ ID NO: 2156 - protein, 9 aa, Mus musculus
LRLFGIDLL

SEQ ID NO: 2157 - protein, 9 aa, Mus musculus
LSFCKSASI

SEQ ID NO: 2158 - protein, 9 aa, Mus musculus
LSVYLKTNV

SEQ ID NO: 2159 - protein, 9 aa, Mus musculus
LTSLTTMQL

SEQ ID NO: 2160 - protein, 9 aa, Mus musculus
MQLYRFIKI

SEQ ID NO: 2161 - protein, 11 aa, unidentified
  REGION 1..11: note = epitope involved in diabetes
MYELLQPAAIV

SEQ ID NO: 2162 - protein, 9 aa, Homo sapiens
NLFLFLFAV

SEQ ID NO: 2163 - protein, 9 aa, Mus musculus
NQNVGTKMI

SEQ ID NO: 2164 - protein, 20 aa, Homo sapiens
PEVKEKGMAALPRLIAFTSE

SEQ ID NO: 2165 - protein, 14 aa, Mus musculus
PSLWEIEFAKQLAS

SEQ ID NO: 2166 - protein, 9 aa, Mus musculus
QLNQNVGTK

SEQ ID NO: 2167 - protein, 20 aa, Homo sapiens
QNCNQMHASYLFQQDKHYDL

SEQ ID NO: 2168 - protein, 9 aa, Mus musculus
RFIKIPTHA

SEQ ID NO: 2169 - protein, 9 aa, Mus musculus
RMEESSVTL

SEQ ID NO: 2170 - protein, 9 aa, Mus musculus
SFCKSASIP

SEQ ID NO: 2171 - protein, 9 aa, Mus musculus
SFLWSVFWL

SEQ ID NO: 2172 - protein, 9 aa, Mus musculus
SRMEESSVT

SEQ ID NO: 2173 - protein, 9 aa, Mus musculus
SRVFIATHF

SEQ ID NO: 2174 - protein, 9 aa, Mus musculus
THAEPLFYL

SEQ ID NO: 2175 - protein, 9 aa, Mus musculus
THFPHQVIL

SEQ ID NO: 2176 - protein, 9 aa, Mus musculus
TSLTTMQLY

SEQ ID NO: 2177 - protein, 9 aa, Mus musculus
TYYGFLNFM

SEQ ID NO: 2178 - protein, 30 aa, Homo sapiens
VCGERGFFYTPKTRREAEDLQVGQVELGGG

SEQ ID NO: 2179 - protein, 9 aa, Mus musculus
VFWLIQISV

SEQ ID NO: 2180 - protein, 9 aa, Mus musculus
YLKTNVFLF

SEQ ID NO: 2181 - protein, 9 aa, Homo sapiens
YLLLRVLNI

SEQ ID NO: 2182 - protein, 9 aa, Mus musculus
YPNHSSPCL

SEQ ID NO: 2183 - protein, 9 aa, Mus musculus
YTISRMEES

SEQ ID NO: 2184 - protein, 10 aa, unidentified
  REGION 1..10: note = epitope involved in diabetes
YVRPLWVRME

SEQ ID NO: 2185 - protein, 10 aa, Homo sapiens
ALWMRLLPLL

SEQ ID NO: 2186 - protein, 13 aa, Homo sapiens
DWIHIDTTPFAGL

SEQ ID NO: 2187 - protein, 13 aa, Homo sapiens
EWVHIDTTPFASL

SEQ ID NO: 2188 - protein, 9 aa, Homo sapiens
FYTPKTRRE

SEQ ID NO: 2189 - protein, 8 aa, Homo sapiens
GERGFFYT

SEQ ID NO: 2190 - protein, 9 aa, Homo sapiens
LPLLALLAL

SEQ ID NO: 2191 - protein, 9 aa, Homo sapiens
LWMRLLPLL

SEQ ID NO: 2192 - protein, 5 aa, Homo sapiens
PAEGT

SEQ ID NO: 2193 - protein, 13 aa, Homo sapiens
QHLQKDYRAYYTF

SEQ ID NO: 2194 - protein, 13 aa, Homo sapiens
RVLNIDLLWSVPI

SEQ ID NO: 2195 - protein, 31 aa, Homo sapiens
WCEDFLVRSFYLKNVQTQETRTLTQFHFLSW

SEQ ID NO: 2196 - protein, 10 aa, Homo sapiens
WMRLLPLLAL

SEQ ID NO: 2197 - protein, 13 aa, Homo sapiens
YTFLNFMSNVGDP

SEQ ID NO: 2198 - protein, 979 aa, Homo sapiens; identical to SEQ ID NO: 2028

SEQ ID NO: 2199 - protein, 15 aa, Mus musculus
AELNQLRAKEPTKLA

SEQ ID NO: 2200 - protein, 15 aa, Mus musculus
ELRELRLRLDQLTAN

SEQ ID NO: 2201 - protein, 9 aa, Homo sapiens
ERGFFYTPK

SEQ ID NO: 2202 - protein, 7 aa, Mus musculus
GLAPSGA

SEQ ID NO: 2203 - protein, 10 aa, Homo sapiens
LCGSHLVEAL

SEQ ID NO: 2204 - protein, 10 aa, Homo sapiens
LVCGERGFFY

SEQ ID NO: 2205 - protein, 10 aa, Homo sapiens
LYLVCGERGF

SEQ ID NO: 2206 - protein, 15 aa, Mus musculus
QVHVEMDVAKPDLTA

SEQ ID NO: 2207 - protein, 9 aa, Mus musculus
WYRSKFADL

SEQ ID NO: 2208 - protein, 13 aa, Bos taurus
FKADEKKFWGKYL

SEQ ID NO: 2209 - protein, 9 aa, Homo sapiens
QMRPVSRVL

SEQ ID NO: 2210 - protein, 5 aa, Bos taurus
ADEKK

SEQ ID NO: 2211 - protein, 16 aa, Bos taurus
ADEKKFWGKYLYEIAR

SEQ ID NO: 2212 - protein, 5 aa, Bos taurus
EFKAD

SEQ ID NO: 2213 - protein, 6 aa, Bos taurus
EFKADE

SEQ ID NO: 2214 - protein, 8 aa, Bos taurus
EFKADEKK

SEQ ID NO: 2215 - protein, 6 aa, Bos taurus
FKADEK

SEQ ID NO: 2216 - protein, 9 aa, Simian immunodeficiency virus
FYCKMNWFL

SEQ ID NO: 2217 - protein, 9 aa, Human alphaherpesvirus sp.
GFIKNFWFI

SEQ ID NO: 2218 - protein, 9 aa, Helicobacter pylori
GYNKAMGFL

SEQ ID NO: 2219 - protein, 9 aa, Helicobacter pylori
IFFKTSSFL

SEQ ID NO: 2220 - protein, 9 aa, Saccharomyces cerevisiae
IYQKANTFL

SEQ ID NO: 2221 - protein, 9 aa, Helicobacter pylori
IYVKTSSFL

SEQ ID NO: 2222 - protein, 6 aa, Bos taurus
KADEKK

SEQ ID NO: 2223 - protein, 9 aa, Borrelia burgdorferi
KYNKNGNFL

SEQ ID NO: 2224 - protein, 9 aa, Haemophilus influenzae
KYYKNSQFL

SEQ ID NO: 2225 - protein, 9 aa, Saccharomyces cerevisiae
KYYKTSNFL

SEQ ID NO: 2226 - protein, 18 aa, Bos taurus
LPKLKPDPNTLCDEFKAD

SEQ ID NO: 2227 - protein, 9 aa, Human alphaherpesvirus sp.
LYSKNLVFL

SEQ ID NO: 2228 - protein, 9 aa, Methanothermobacter thermautotrophicus
NFMKTAGFI

SEQ ID NO: 2229 - protein, 9 aa, Rickettsia prowazekii
QYNKTGYFI

SEQ ID NO: 2230 - protein, 9 aa, Langat virus
RFSKALYFL

SEQ ID NO: 2231 - protein, 9 aa, Escherichia coli
RYQKAGVML

SEQ ID NO: 2232 - protein, 9 aa, Human alphaherpesvirus sp.
TYLKNAQFV

SEQ ID NO: 2233 - protein, 9 aa, Drosophila melanogaster
VYVKTSSFI

SEQ ID NO: 2234 - protein, 9 aa, Haemophilus influenzae
YFLKCGYFL

SEQ ID NO: 2235 - protein, 9 aa, Human alphaherpesvirus sp.
YYNKALSFI

SEQ ID NO: 2236 - protein, 21 aa, Homo sapiens
HGDTTFEYQDLCRQHMATKSL

SEQ ID NO: 2237 - protein, 21 aa, Homo sapiens
RLAALGPEGAHGDTTFEYQDL

SEQ ID NO: 2238 - protein, 20 aa, Homo sapiens
RQHARQQDKERLAALGPEGA

SEQ ID NO: 2239 - protein, 42 aa, Homo sapiens
RQHARQQDKERLAALGPEGAHGDTTFEYQDLCRQHMATKSLF

SEQ ID NO: 2240 - protein, 16 aa, Mus musculus
QCCTSICSLYQLENYC

SEQ ID NO: 2241 - protein, 12 aa, Bos taurus
EDKGACLLPKIE

SEQ ID NO: 2242 - protein, 30 aa, Homo sapiens
FFRMVISNPAATHQDIDFLIEEIERLGQDL

SEQ ID NO: 2243 - protein, 41 aa, Homo sapiens
GGAISNMYAMMIARFKMFPEVKEKGMAALPRLIAFTSEHSH

SEQ ID NO: 2244 - protein, 9 aa, unidentified
  REGION 1..9: note = epitope involved in diabetes
LYLVCGERL

SEQ ID NO: 2245 - protein, 17 aa, Homo sapiens
NIIKNREGYEMVFDGKP

SEQ ID NO: 2246 - protein, 4 aa, Homo sapiens
PGGS

SEQ ID NO: 2247 - protein, 9 aa, Homo sapiens
VIKARMMEY

SEQ ID NO: 2248 - protein, 9 aa, unidentified
  REGION 1..9: note = epitope involved in diabetes
YAIENYLEL

SEQ ID NO: 2249 - protein, 585 aa, Homo sapiens; identical to SEQ ID NO: 1841

SEQ ID NO: 2250 - protein, 12 aa, Mus musculus
LYFCAARSNYQL

SEQ ID NO: 2251 - protein, 15 aa, Homo sapiens
AYVLLSEKKISSIQS

SEQ ID NO: 2252 - protein, 15 aa, Homo sapiens
GEALSTLVLNRLKVG

SEQ ID NO: 2253 - protein, 15 aa, Human alphaherpesvirus sp.
GEALSTLVVNKIRGT

SEQ ID NO: 2254 - protein, 11 aa, Homo sapiens
ALWGPDPAAAF

SEQ ID NO: 2255 - protein, 10 aa, Homo sapiens
LALWGPDPAA

SEQ ID NO: 2256 - protein, 11 aa, Homo sapiens
RLLPLLALLAL

SEQ ID NO: 2257 - protein, 42 aa, Homo sapiens
IAATLEHVRDQRPGLVRSKDQFEFALTAVAEEVNAILKALPQ

SEQ ID NO: 2258 - protein, 9 aa, Homo sapiens
NLAQDLATV

SEQ ID NO: 2259 - protein, 9 aa, Homo sapiens
QLARQQVHV

SEQ ID NO: 2260 - protein, 979 aa, Homo sapiens; identical to SEQ ID NO: 2028

SEQ ID NO: 2261 - protein, 12 aa, Human alphaherpesvirus sp.
EWLKVKILPEVK

SEQ ID NO: 2262 - protein, 20 aa, Enterovirus A
WLKVKILPEVKEKHEFLNRL

SEQ ID NO: 2263 - protein, 15 aa, Human alphaherpesvirus sp.
GKTCPKEIPKGSKNT

SEQ ID NO: 2264 - protein, 23 aa, Homo sapiens
ARFKMFPEVKEKGMAALPRLIAF

SEQ ID NO: 2265 - protein, 23 aa, Human alphaherpesvirus sp.
LKVKILPEVKEKHEFLSRLKQLP

SEQ ID NO: 2266 - protein, 10 aa, unidentified
  REGION 1..10: note = epitope involved in diabetes
SLYQLENYCA

SEQ ID NO: 2267 - protein, 13 aa, Mus musculus
YKMFPEVKEKGMA

SEQ ID NO: 2268 - protein, 13 aa, Mus musculus
YKYFPEVKTKGMA

SEQ ID NO: 2269 - protein, 9 aa, unidentified
  REGION 1..9: note = epitope involved in diabetes
ARKVKGAAG

SEQ ID NO: 2270 - protein, 9 aa, unidentified
  REGION 1..9: note = epitope involved in diabetes
ARLSVVRNG

SEQ ID NO: 2271 - protein, 21 aa, Homo sapiens
DKVNFFRMVISNPAATHQDID

SEQ ID NO: 2272 - protein, 9 aa, unidentified
  REGION 1..9: note = epitope involved in diabetes
FRKADKFPM

SEQ ID NO: 2273 - protein, 9 aa, unidentified
  REGION 1..9: note = epitope involved in diabetes
FRKTSISGA

SEQ ID NO: 2274 - protein, 9 aa, unidentified
  REGION 1..9: note = epitope involved in diabetes
FRKTSKGGS

SEQ ID NO: 2275 - protein, 9 aa, unidentified
  REGION 1..9: note = epitope involved in diabetes
GGTTTPRTT

SEQ ID NO: 2276 - protein, 9 aa, unidentified
  REGION 1..9: note = epitope involved in diabetes
GRKSAVSPA

SEQ ID NO: 2277 - protein, 9 aa, unidentified
  REGION 1..9: note = epitope involved in diabetes
HKKSLSSPS

SEQ ID NO: 2278 - protein, 9 aa, unidentified
  REGION 1..9: note = epitope involved in diabetes
HRKSTVAGS

SEQ ID NO: 2279 - protein, 9 aa, unidentified
  REGION 1..9: note = epitope involved in diabetes
KGKKALQSA

SEQ ID NO: 2280 - protein, 9 aa, unidentified
  REGION 1..9: note = epitope involved in diabetes
KKKKYAEAV

SEQ ID NO: 2281 - protein, 9 aa, unidentified
  REGION 1..9: note = epitope involved in diabetes
KKTKGLVTT

SEQ ID NO: 2282 - protein, 9 aa, unidentified
  REGION 1..9: note = epitope involved in diabetes
KRRASAGGP

SEQ ID NO: 2283 - protein, 9 aa, unidentified
  REGION 1..9: note = epitope involved in diabetes
KSVKPRQAT

SEQ ID NO: 2284 - protein, 9 aa, unidentified
  REGION 1..9: note = epitope involved in diabetes
LRKKGYDPG

SEQ ID NO: 2285 - protein, 9 aa, unidentified
  REGION 1..9: note = epitope involved in diabetes
LSRKKTLTT

SEQ ID NO: 2286 - protein, 13 aa, Homo sapiens
MFPEVKEKGMAAL

SEQ ID NO: 2287 - protein, 9 aa, unidentified
  REGION 1..9: note = epitope involved in diabetes
MRKANSPPT

SEQ ID NO: 2288 - protein, 9 aa, unidentified
  REGION 1..9: note = epitope involved in diabetes
MRKSTGTAS

SEQ ID NO: 2289 - protein, 9 aa, unidentified
  REGION 1..9: note = epitope involved in diabetes
NRKLKSNMM

SEQ ID NO: 2290 - protein, 9 aa, unidentified
  REGION 1..9: note = epitope involved in diabetes
NRRLLPMPE

SEQ ID NO: 2291 - protein, 9 aa, unidentified
  REGION 1..9: note = epitope involved in diabetes
QKKMVALSG

SEQ ID NO: 2292 - protein, 9 aa, unidentified
  REGION 1..9: note = epitope involved in diabetes
QKRAKGLSA

SEQ ID NO: 2293 - protein, 9 aa, unidentified
  REGION 1..9: note = epitope involved in diabetes
RGLKSKIAM

SEQ ID NO: 2294 - protein, 9 aa, unidentified
  REGION 1..9: note = epitope involved in diabetes
RKKKPPGLA

SEQ ID NO: 2295 - protein, 9 aa, unidentified
  REGION 1..9: note = epitope involved in diabetes
RKLAHPGTS

SEQ ID NO: 2296 - protein, 9 aa, unidentified
  REGION 1..9: note = epitope involved in diabetes
RKRTRHLEG

SEQ ID NO: 2297 - protein, 9 aa, unidentified
  REGION 1..9: note = epitope involved in diabetes
RKTALGTRQ

SEQ ID NO: 2298 - protein, 9 aa, unidentified
  REGION 1..9: note = epitope involved in diabetes
RKVVQTSLE

SEQ ID NO: 2299 - protein, 9 aa, unidentified
  REGION 1..9: note = epitope involved in diabetes
RRKLRTNAG

SEQ ID NO: 2300 - protein, 9 aa, unidentified
  REGION 1..9: note = epitope involved in diabetes
RRKPGTEQL

SEQ ID NO: 2301 - protein, 9 aa, unidentified
  REGION 1..9: note = epitope involved in diabetes
RSLKTKLPS

SEQ ID NO: 2302 - protein, 9 aa, unidentified
  REGION 1..9: note = epitope involved in diabetes
SRKATASLP

SEQ ID NO: 2303 - protein, 9 aa, unidentified
  REGION 1..9: note = epitope involved in diabetes
SRKKTFTGA

SEQ ID NO: 2304 - protein, 9 aa, unidentified
  REGION 1..9: note = epitope involved in diabetes
SRKSGSLTK

SEQ ID NO: 2305 - protein, 9 aa, unidentified
  REGION 1..9: note = epitope involved in diabetes
SRKVALQGG

SEQ ID NO: 2306 - protein, 9 aa, unidentified
  REGION 1..9: note = epitope involved in diabetes
TKLSNTPSP

SEQ ID NO: 2307 - protein, 9 aa, unidentified
  REGION 1..9: note = epitope involved in diabetes
TQDLGYSRV

SEQ ID NO: 2308 - protein, 9 aa, unidentified
  REGION 1..9: note = epitope involved in diabetes
TRGLKGAPQ

SEQ ID NO: 2309 - protein, 9 aa, unidentified
  REGION 1..9: note = epitope involved in diabetes
TRKALTQNT

SEQ ID NO: 2310 - protein, 20 aa, Homo sapiens
VFDGKPQHTNVCFWYIPPSL

SEQ ID NO: 2311 - protein, 20 aa, Homo sapiens
VNFFRMVISNPAATHQDIDF

SEQ ID NO: 2312 - protein, 9 aa, unidentified
  REGION 1..9: note = epitope involved in diabetes
VRKLTVTSA

SEQ ID NO: 2313 - protein, 9 aa, unidentified
  REGION 1..9: note = epitope involved in diabetes
YKKGARPIQ

SEQ ID NO: 2314 - protein, 9 aa, unidentified
  REGION 1..9: note = epitope involved in diabetes
YRKKSSAEL

SEQ ID NO: 2315 - protein, 9 aa, unidentified
  REGION 1..9: note = epitope involved in diabetes
YRKTAKEGT

SEQ ID NO: 2316 - protein, 29 aa, Human alphaherpesvirus sp.
EACVTSWLWSEGEGAVFYRVDLHFINLGT

SEQ ID NO: 2317 - protein, 21 aa, Human alphaherpesvirus sp.
MDFWCVEHDRPPPATPTSLTT

SEQ ID NO: 2318 - protein, 15 aa, Homo sapiens
NMFTYEIAPVFVLME

SEQ ID NO: 2319 - protein, 25 aa, Human alphaherpesvirus sp.
PFLGHDGHHGGTLRVGQHHRNASDV

SEQ ID NO: 2320 - protein, 21 aa, Human alphaherpesvirus sp.
RVKFHTETRTVWQLSVAGVSC

SEQ ID NO: 2321 - protein, 16 aa, Human alphaherpesvirus sp.
KILPEVKEKHEFLSRL

SEQ ID NO: 2322 - protein, 17 aa, Homo sapiens
KMFPEVKEKGMAALPRL

SEQ ID NO: 2323 - protein, 17 aa, Homo sapiens
KYFPEVKTKGMAAVPKL

SEQ ID NO: 2324 - protein, 7 aa, unidentified
  REGION 1..7: note = epitope involved in diabetes
KRSRLDV

SEQ ID NO: 2325 - protein, 7 aa, unidentified
  REGION 1..7: note = epitope involved in diabetes
LGRGGSK

SEQ ID NO: 2326 - protein, 7 aa, unidentified
  REGION 1..7: note = epitope involved in diabetes
RLGKRDS

SEQ ID NO: 2327 - protein, 7 aa, unidentified
  REGION 1..7: note = epitope involved in diabetes
RQLGRGS

SEQ ID NO: 2328 - protein, 7 aa, unidentified
  REGION 1..7: note = epitope involved in diabetes
STVQDCV

SEQ ID NO: 2329 - protein, 7 aa, unidentified
  REGION 1..7: note = epitope involved in diabetes
YLGRGDK

SEQ ID NO: 2330 - protein, 12 aa, Photobacterium phosphoreum
AKVAIVIARFNS

SEQ ID NO: 2331 - protein, 12 aa, Human alphaherpesvirus sp.
GGVAVVIGRFFG

SEQ ID NO: 2332 - protein, 12 aa, Synechocystis sp.
SAIGIYLGRFLR

SEQ ID NO: 2333 - protein, 10 aa, Mus musculus
HLCGPHLVEA

SEQ ID NO: 2334 - protein, 9 aa, Mus musculus
IVDQCCTSI

SEQ ID NO: 2335 - protein, 9 aa, Mus musculus
LLVHFLPLL

SEQ ID NO: 2336 - protein, 13 aa, Streptococcus pneumoniae
DDIMMSYAAKGFV

SEQ ID NO: 2337 - protein, 13 aa, Rickettsia prowazekii
ELVLMSYRDKLVL

SEQ ID NO: 2338 - protein, 13 aa, Human alphaherpesvirus sp.
KELLQSYVSKNNN

SEQ ID NO: 2339 - protein, 13 aa, Legionella pneumophila
KMSLLQYIVKNKI

SEQ ID NO: 2340 - protein, 13 aa, Lactococcus lactis
LVILPMFHVSGLS

SEQ ID NO: 2341 - protein, 13 aa, Homo sapiens
PIILPLWHVGEPG

SEQ ID NO: 2342 - protein, 13 aa, Homo sapiens
PIILPLWHVGMND

SEQ ID NO: 2343 - protein, 13 aa, Neisseria meningitidis
PVILPQWQSLGNR

SEQ ID NO: 2344 - protein, 13 aa, Staphylococcus aureus
PYVLLAYIVKSVG

SEQ ID NO: 2345 - protein, 13 aa, Human alphaherpesvirus sp.
QAMNILYQTVQAF

SEQ ID NO: 2346 - protein, 13 aa, Streptococcus pyogenes
REILPQYQLVILA

SEQ ID NO: 2347 - protein, 13 aa, Homo sapiens
TTLLPQWRVSAFV

SEQ ID NO: 2348 - protein, 12 aa, Homo sapiens
AYAKDVKFGADA

SEQ ID NO: 2349 - protein, 13 aa, Mus musculus
LSKVAPVIKARMM

SEQ ID NO: 2350 - protein, 10 aa, unidentified
  REGION 1..10: note = epitope involved in diabetes
SRLGLWVRME

SEQ ID NO: 2351 - protein, 14 aa, Mus musculus
WSRMDQLAKELTAE

SEQ ID NO: 2352 - protein, 18 aa, Mus musculus
FLPLLALLALWEPKPTQA

SEQ ID NO: 2353 - protein, 20 aa, Homo sapiens
GGGPGAGSLQPLALEGSLQK

SEQ ID NO: 2354 - protein, 24 aa, Homo sapiens
KLKVESSPSRSDYINASPIIEHDP

SEQ ID NO: 2355 - protein, 28 aa, Homo sapiens
LAKEWQALCAYQAEPNTCATAQGEGNIK

SEQ ID NO: 2356 - protein, 20 aa, Homo sapiens
SFYLKNVQTQETRTLTQFHF

SEQ ID NO: 2357 - protein, 22 aa, Homo sapiens
SKDQFEFALTAVAEEVNAILKA

SEQ ID NO: 2358 - protein, 29 aa, Homo sapiens
SRVSSVSSQFSDAAQASPSSHSSTPSWCE

SEQ ID NO: 2359 - protein, 12 aa, Homo sapiens
AFLQDVMNILLQ

SEQ ID NO: 2360 - protein, 19 aa, Homo sapiens
ALLRCIPALDSLTPANEDC

SEQ ID NO: 2361 - protein, 12 aa, Homo sapiens
APKRPGPAGELL

SEQ ID NO: 2362 - protein, 12 aa, Human alphaherpesvirus sp.
ATCRFYTLDSIK

SEQ ID NO: 2363 - protein, 12 aa, Human alphaherpesvirus sp.
DINTVTTVAQSR

SEQ ID NO: 2364 - protein, 12 aa, Human alphaherpesvirus sp.
DRVRSITLGNST

SEQ ID NO: 2365 - protein, 12 aa, Homo sapiens
EEIAQVATISAN

SEQ ID NO: 2366 - protein, 12 aa, Human alphaherpesvirus sp.
ETSLSAAGNSII

SEQ ID NO: 2367 - protein, 12 aa, Homo sapiens
FFRMVISNPAAT

SEQ ID NO: 2368 - protein, 12 aa, Homo sapiens
GADIKKTMEGPV

SEQ ID NO: 2369 - protein, 12 aa, Homo sapiens
GVELRQLTPEQL

SEQ ID NO: 2370 - protein, 12 aa, Homo sapiens
KDVKFGADARAL

SEQ ID NO: 2371 - protein, 16 aa, Homo sapiens
KEQFEFALTAVAEEVC

SEQ ID NO: 2372 - protein, 12 aa, Homo sapiens
KFGADARALMLQ

SEQ ID NO: 2373 - protein, 12 aa, Homo sapiens
KTGHPRYFNQLS

SEQ ID NO: 2374 - protein, 12 aa, Human alphaherpesvirus sp.
LLESQIATIEQT

SEQ ID NO: 2375 - protein, 12 aa, Homo sapiens
LLQYVVKSFDRS

SEQ ID NO: 2376 - protein, 12 aa, Homo sapiens
LRLLLCLLLLSS

SEQ ID NO: 2377 - protein, 12 aa, Homo sapiens
LRQLTPEQLSTL

SEQ ID NO: 2378 - protein, 12 aa, Human alphaherpesvirus sp.
LTAVETGHTSQV

SEQ ID NO: 2379 - protein, 12 aa, Homo sapiens
LTRAYAKDVKFG

SEQ ID NO: 2380 - protein, 12 aa, Homo sapiens
PPEPRPRDRSGL

SEQ ID NO: 2381 - protein, 12 aa, Homo sapiens
PRPRDRSGLAPK

SEQ ID NO: 2382 - protein, 12 aa, Human alphaherpesvirus sp.
PSNSASVPALTA

SEQ ID NO: 2383 - protein, 12 aa, Homo sapiens
PTLAFLQDVMNI

SEQ ID NO: 2384 - protein, 23 aa, Human alphaherpesvirus sp.
PVKDVMIKSLPAPALNSPTVEEC

SEQ ID NO: 2385 - protein, 12 aa, Homo sapiens
RDRSGLAPKRPG

SEQ ID NO: 2386 - protein, 12 aa, Homo sapiens
RLRPPEPRPRDR

SEQ ID NO: 2387 - protein, 12 aa, Human alphaherpesvirus sp.
RSGPSNSASVPA

SEQ ID NO: 2388 - protein, 12 aa, Human alphaherpesvirus sp.
RSITLGNSTITT

SEQ ID NO: 2389 - protein, 12 aa, Homo sapiens
RTALLDAAGVAS

SEQ ID NO: 2390 - protein, 12 aa, Human alphaherpesvirus sp.
SASVPALTAVET

SEQ ID NO: 2391 - protein, 12 aa, Homo sapiens
SGGLRLLLCLLL

SEQ ID NO: 2392 - protein, 12 aa, Homo sapiens
SGLAPKRPGPAG

SEQ ID NO: 2393 - protein, 12 aa, Human alphaherpesvirus sp.
SLEKKMSNYIQF

SEQ ID NO: 2394 - protein, 12 aa, Human alphaherpesvirus sp.
SQIATIEQTAPS

SEQ ID NO: 2395 - protein, 12 aa, Human alphaherpesvirus sp.
TKQMVQMRRKLE

SEQ ID NO: 2396 - protein, 12 aa, Human alphaherpesvirus sp.
TRKDINTVTTVA

SEQ ID NO: 2397 - protein, 12 aa, Human alphaherpesvirus sp.
VETGHTSQVTPS

SEQ ID NO: 2398 - protein, 12 aa, Homo sapiens
VKEKGMAALPRL

SEQ ID NO: 2399 - protein, 17 aa, Human alphaherpesvirus sp.
VMIKSLPALNSPTVEEC

SEQ ID NO: 2400 - protein, 12 aa, Human alphaherpesvirus sp.
VPALTAVETGHT

SEQ ID NO: 2401 - protein, 14 aa, Mus musculus
EYVTLKKMREIIGW

SEQ ID NO: 2402 - protein, 20 aa, Homo sapiens
DVMNILLQYVVKSFDRSTKV

SEQ ID NO: 2403 - protein, 20 aa, Homo sapiens
GAGSLQPLALEGSLQKRGIV

SEQ ID NO: 2404 - protein, 20 aa, Homo sapiens
KDYRAYYTFLNFMSNVGDPR

SEQ ID NO: 2405 - protein, 20 aa, Homo sapiens
KVNFFRMVISNPAATHQDID

SEQ ID NO: 2406 - protein, 20 aa, Homo sapiens
LIAFTSEHSHFSLKKGAAAL

SEQ ID NO: 2407 - protein, 20 aa, Homo sapiens
RLQQLVLDPGFLGLEPLLDL

SEQ ID NO: 2408 - protein, 20 aa, Porphyromonas gingivalis
TLVVNRLRGSLKICAVKAPG

SEQ ID NO: 2409 - protein, 11 aa, unidentified
  REGION 1..11: note = epitope involved in diabetes
AHHPIWARMDA

SEQ ID NO: 2410 - protein, 14 aa, Mus musculus
DTKVMKCVLEVISD

SEQ ID NO: 2411 - protein, 20 aa, Homo sapiens
DSVILIKCDERGKMIPSDLE

SEQ ID NO: 2412 - protein, 20 aa, Homo sapiens
HKWKLSGVERANSVTWNPHK

SEQ ID NO: 2413 - protein, 20 aa, Homo sapiens
KCLELAEYLYNIIKNREGYE

SEQ ID NO: 2414 - protein, 20 aa, Homo sapiens
KGMAALPRLIAFTSEHSHFS

SEQ ID NO: 2415 - protein, 20 aa, Homo sapiens
RPTLAFLQDVMNILLQYVVK

SEQ ID NO: 2416 - protein, 20 aa, Homo sapiens
YDLSYDTGDKALQCGRHVDV

SEQ ID NO: 2417 - protein, 13 aa, Homo sapiens
IPALDSLTPANED

SEQ ID NO: 2418 - protein, 20 aa, Homo sapiens
PTIAFLQDVMNILLQYVVKS

SEQ ID NO: 2419 - protein, 15 aa, unidentified
  REGION 1..15: note = epitope involved in diabetes
SHLVEALYLVCGEEG

SEQ ID NO: 2420 - protein, 15 aa, unidentified
  REGION 1..15: note = epitope involved in diabetes
SHLVEALYLVCGGEG

SEQ ID NO: 2421 - protein, 369 aa, Homo sapiens
MEFLERTYLVNDKAAKMYAFTLESVELQQKPVNKDQCPRERPEELESGGMYHCHSGSKPTEKGANEYAYAKWKLCSASAICFIFMIAEVVGGHIAGSLAVVTDAAHLLIDLTSFLLSLFSLWLSSKPPSKRLTFGWHRAEILGALLSILCIWVVTGVLVYLACERLLYPDYQIQATVMIIVSSCAVAANIVLTVVLHQRCLGHNHKEVQANASVRAAFVHALGDLFQSISVLISALIIYFKPEYKIADPICTFIFSILVLASTITILKDFSILLMEGVPKSLNYSGVKELILAVDGVLSVHSLHIWSLTMNQVILSAHVATAASRDSQVVRREIAKALSKSFTMHSLTIQMESPVDQDPDCLFCEDPCD

SEQ ID NO: 2422 - protein, 18 aa, Homo sapiens
LPRLIAFTSEHSHFSLKK

SEQ ID NO: 2423 - protein, 14 aa, Homo sapiens
VNFFRMVISNPAAT

SEQ ID NO: 2424 - protein, 10 aa, Homo sapiens
PLALEGSLQK

SEQ ID NO: 2425 - protein, 10 aa, Homo sapiens
PLLALLALWG

SEQ ID NO: 2426 - protein, 12 aa, Mus musculus
ASSLGGNQDTQY

SEQ ID NO: 2427 - protein, 9 aa, Homo sapiens
ALGDLFQSI

SEQ ID NO: 2428 - protein, 10 aa, Homo sapiens
AVAANIVLTV

SEQ ID NO: 2429 - protein, 10 aa, Homo sapiens
FLLSLFSLWL

SEQ ID NO: 2430 - protein, 9 aa, Homo sapiens
HIAGSLAVV

SEQ ID NO: 2431 - protein, 10 aa, Homo sapiens
ILAVDGVLSV

SEQ ID NO: 2432 - protein, 9 aa, Homo sapiens
ILKDFSILL

SEQ ID NO: 2433 - protein, 10 aa, Homo sapiens
ILVLASTITI

SEQ ID NO: 2434 - protein, 9 aa, Homo sapiens
LLIDLTSFL

SEQ ID NO: 2435 - protein, 9 aa, Homo sapiens
SISVLISAL

SEQ ID NO: 2436 - protein, 9 aa, Homo sapiens
VVTGVLVYL

SEQ ID NO: 2437 - protein, 9 aa, Homo sapiens
FIFSILVLA

SEQ ID NO: 2438 - protein, 9 aa, Homo sapiens
IQATVMIIV

SEQ ID NO: 2439 - protein, 9 aa, Homo sapiens
KMYAFTLES

SEQ ID NO: 2440 - protein, 9 aa, Homo sapiens
KSLNYSGVK

SEQ ID NO: 2441 - protein, 9 aa, Homo sapiens
LLSILCIWV

SEQ ID NO: 2442 - protein, 9 aa, Homo sapiens
LLSLFSLWL

SEQ ID NO: 2443 - protein, 9 aa, Homo sapiens
MIIVSSCAV

SEQ ID NO: 2444 - protein, 9 aa, Homo sapiens
RLLYPDYQI

SEQ ID NO: 2445 - protein, 9 aa, Homo sapiens
TMHSLTIQM

SEQ ID NO: 2446 - protein, 9 aa, Homo sapiens
VAANIVLTV

SEQ ID NO: 2447 - protein, 27 aa, Homo sapiens
ACERLLYPDYQIQATVMIIVSSCAVAA

SEQ ID NO: 2448 - protein, 27 aa, Homo sapiens
AKMHAFTLESVELQQKPVNKDQCPRER

SEQ ID NO: 2449 - protein, 27 aa, Homo sapiens
ANEYAYAKWKLCSASAICFIFMIAEVV

SEQ ID NO: 2450 - protein, 34 aa, Homo sapiens
ASRDSQVVRREIAKALSKSFTMHSLTIQMESPVD

SEQ ID NO: 2451 - protein, 27 aa, Homo sapiens
DGVLSVHSLHIWSLTMNQVILSAHVAT

SEQ ID NO: 2452 - protein, 27 aa, Homo sapiens
EELESGGMYHCHSGSKPTEKGANEYAY

SEQ ID NO: 2453 - protein, 41 aa, Homo sapiens
FGWHRAEILGALLSILCIWVVTGVLVYLACERLLYPDYQIQ

SEQ ID NO: 2454 - protein, 27 aa, Homo sapiens
FIFSILVLASTITILKDFSILLMEGVP

SEQ ID NO: 2455 - protein, 27 aa, Homo sapiens
GHIAGSLAVVTDAAHLLIDLTSFLLSL

SEQ ID NO: 2456 - protein, 27 aa, Homo sapiens
HLLIDLTSFLLSLFSLWLSSKPPSKRL

SEQ ID NO: 2457 - protein, 27 aa, Homo sapiens
HQRCLGHNHKEVQANASVRAAFVHALG

SEQ ID NO: 2458 - protein, 27 aa, Homo sapiens
LFQSISVLISALIIYFKPEYKIADPIC

SEQ ID NO: 2459 - protein, 27 aa, Homo sapiens
LKDFSILLMEGVPKSLNYSGVKELILA

SEQ ID NO: 2460 - protein, 27 aa, Homo sapiens
MEFLERTYLVNDKAAKMHAFTLESVEL

SEQ ID NO: 2461 - protein, 26 aa, Homo sapiens
MHSLTIQMESPVDQDPDCLFCEDPCD

SEQ ID NO: 2462 - protein, 27 aa, Homo sapiens
NASVRAAFVHALGDLFQSISVLISALI

SEQ ID NO: 2463 - protein, 27 aa, Homo sapiens
QKPVNKDQCPRERPEELESGGMYHCHS

SEQ ID NO: 2464 - protein, 27 aa, Homo sapiens
SAICFIFMIAEVVGGHIAGSLAVVTDA

SEQ ID NO: 2465 - protein, 27 aa, Homo sapiens
SCAVAANIVLTVVLHQRCLGHNHKEVQ

SEQ ID NO: 2466 - protein, 27 aa, Homo sapiens
SLNYSGVKELILAVDGVLSVHSLHIWS

SEQ ID NO: 2467 - protein, 27 aa, Homo sapiens
SLWLSSKPPSKRLTFGWHRAEILGALL

SEQ ID NO: 2468 - protein, 27 aa, Homo sapiens
TMNQVILSAHVATAASRDSQVVRREIA

SEQ ID NO: 2469 - protein, 27 aa, Homo sapiens
YFKPEYKIADPICTFIFSILVLASTIT

SEQ ID NO: 2470 - protein, 9 aa, Mus musculus
AINSEMFLR

SEQ ID NO: 2471 - protein, 10 aa, Mus musculus
LALEVARQKR

SEQ ID NO: 2472 - protein, 10 aa, Mus musculus
TLALEVAQQK

SEQ ID NO: 2473 - protein, 10 aa, Mus musculus
TLALEVARQK

SEQ ID NO: 2474 - protein, 20 aa, Mycobacterium tuberculosis
TLVVNKIRGTFKSVAVKAPG

SEQ ID NO: 2475 - protein, 20 aa, Human alphaherpesvirus sp.
TLVVNKLQGLLQVTVVTIPQ

SEQ ID NO: 2476 - protein, 14 aa, Homo sapiens
LTVGLTRRGQPRQY

SEQ ID NO: 2477 - protein, 13 aa, Homo sapiens
YNQYSQRYHQRTN

SEQ ID NO: 2478 - protein, 9 aa, Homo sapiens
ACDGERPTL

SEQ ID NO: 2479 - protein, 9 aa, Homo sapiens
AHVDKCLEL

SEQ ID NO: 2480 - protein, 10 aa, unidentified
  REGION 1..10: note = epitope involved in diabetes
ALWGPDPAAV

SEQ ID NO: 2481 - protein, 9 aa, Homo sapiens
APVIKARMM

SEQ ID NO: 2482 - protein, 10 aa, unidentified
  REGION 1..10: note = epitope involved in diabetes
AQWGPDPAAV

SEQ ID NO: 2483 - protein, 10 aa, Homo sapiens
HPRYFNQLST

SEQ ID NO: 2484 - protein, 10 aa, Homo sapiens
IPSDLERRIL

SEQ ID NO: 2485 - protein, 10 aa, unidentified
  REGION 1..10: note = epitope involved in diabetes
RQWGPDPAAV

SEQ ID NO: 2486 - protein, 9 aa, Homo sapiens
SPGSGFWSF

SEQ ID NO: 2487 - protein, 1015 aa, Homo sapiens
MGPPLPLLLLLLLLLPPRVLPAAPSSVPRGRQLPGRLGCLLEEGLCGASEACVNDGVFGRCQKVPAMDFYRYEVSPVALQRLRVALQKLSGTGFTWQDDYTQYVMDQELADLPKTYLRRPEASSPARPSKHSVGSERRYSREGGAALANALRRHLPFLEALSQAPASDVLARTHTAQDRPPAEGDDRFSESILTYVAHTSALTYPPGSRTQLREDLLPRTLGQLQPDELSPKVDSGVDRHHLMAALSAYAAQRPPAPPGEGSLEPQYLLRAPSRMPRPLLAPAAPQKWPSPLGDSEDPSSTGDGARIHTLLKDLQRQPAEVRGLSGLELDGMAELMAGLMQGVDHGVARGSPGRAALGESGEQADGPKATLRGDSFPDDGVQDDDDRLYQEVHRLSATLGGLLQDHGSRLLPGALPFARPLDMERKKSEHPESSLSSEEETAGVENVKSQTYSKDLLGQQPHSEPGAAAFGELQNQMPGPSKEEQSLPAGAQEALSDGLQLEVQPSEEEARGYIVTDRDPLRPEEGRRLVEDVARLLQVPSSAFADVEVLGPAVTFKVSANVQNVTTEDVEKATVDNKDKLEETSGLKILQTGVGSKSKLKFLPPQAEQEDSTKFIALTLVSLACILGVLLASGLIYCLRHSSQHRLKEKLSGLGGDPGADATAAYQELCRQRMATRPPDRPEGPHTSRISSVSSQFSDGPIPSPSARSSASSWSEEPVQSNMDISTGHMILSYMEDHLKNKNRLEKEWEALCAYQAEPNSSFVAQREENVPKNRSLAVLTYDHSRVLLKAENSHSHSDYINASPIMDHDPRNPAYIATQGPLPATVADFWQMVWESGCVVIVMLTPLAENGVRQCYHYWPDEGSNLYHIYEVNLVSEHIWCEDFLVRSFYLKNLQTNETRTVTQFHFLSWYDRGVPSSSRSLLDFRRKVNKCYRGRSCPIIVHCSDGAGRSGTYVLIDMVLNKMAKGAKEIDIAATLEHLRDQRPGMVQTKEQFEFALTAVAEEVNAILKALPQ

SEQ ID NO: 2488 - protein, 979 aa, Homo sapiens; identical to SEQ ID NO: 2028

SEQ ID NO: 2489 - protein, 11 aa, Homo sapiens
ERLGPLVEQGR

SEQ ID NO: 2490 - protein, 20 aa, Mus musculus
KCNTATCATQRALNFLVRSS

SEQ ID NO: 2491 - protein, 18 aa, Mus musculus
FAINSEMFLRSCQGENGT

SEQ ID NO: 2492 - protein, 18 aa, Mus musculus
FIKIPTHAEPLFYLLSFC

SEQ ID NO: 2493 - protein, 18 aa, Mus musculus
LTTMQLYRFIKIPTHAEP

SEQ ID NO: 2494 - protein, 18 aa, Mus musculus
TKMIWVAVIGDWFNLIFK

SEQ ID NO: 2495 - protein, 7 aa, Mycobacterium avium
GDSARVL

SEQ ID NO: 2496 - protein, 7 aa, Mycobacterium avium
HATVQID

SEQ ID NO: 2497 - protein, 7 aa, Mycobacterium avium
HLISTGD

SEQ ID NO: 2498 - protein, 9 aa, Mycobacterium avium
LAANFVVAL

SEQ ID NO: 2499 - protein, 7 aa, Mycobacterium avium
LSPGKDM

SEQ ID NO: 2500 - protein, 9 aa, Mycobacterium avium
MIAVALAGL

SEQ ID NO: 2501 - protein, 15 aa, Homo sapiens
ERTYLVNDKAAKMHA

SEQ ID NO: 2502 - protein, 15 aa, Homo sapiens
IFSILVLASTITILK

SEQ ID NO: 2503 - protein, 23 aa, Homo sapiens
KERLAALGPEGAHGDTTFEYQDL

SEQ ID NO: 2504 - protein, 14 aa, Homo sapiens
YAYAKWKLCSASAI

SEQ ID NO: 2505 - protein, 15 aa, Homo sapiens
YKIADPICTFIFSIL

SEQ ID NO: 2506 - protein, 20 aa, Mycobacterium tuberculosis
AASGPKVVIDGKDQNVTGSV

SEQ ID NO: 2507 - protein, 20 aa, Human alphaherpesvirus sp.
AGAGGGAGGAGAGGGAGGAG

SEQ ID NO: 2508 - protein, 21 aa, Human alphaherpesvirus sp.
AGAGGGAGGAGAGGGAGGAGA

SEQ ID NO: 2509 - protein, 15 aa, Mycobacterium tuberculosis
AGKPLLIIAEDVEGE

SEQ ID NO: 2510 - protein, 13 aa, Homo sapiens
AGWLADRSVRYPI

SEQ ID NO: 2511 - protein, 10 aa, Mycobacterium tuberculosis
ALSTLVVNKI

SEQ ID NO: 2512 - protein, 15 aa, Mycobacterium tuberculosis
ALSTLVVNKIRGTFK

SEQ ID NO: 2513 - protein, 20 aa, Mycobacterium tuberculosis
ASATKDGSHYKITGTATGVD

SEQ ID NO: 2514 - protein, 20 aa, Mycobacterium tuberculosis
ATGVDMANPMSPVNKSFEIE

SEQ ID NO: 2515 - protein, 10 aa, Human alphaherpesvirus sp.
AVFDRKSDAK

SEQ ID NO: 2516 - protein, 9 aa, Human alphaherpesvirus sp.
AYRRRWRRL

SEQ ID NO: 2517 - protein, 9 aa, Human alphaherpesvirus sp.
CLGGLLTMV

SEQ ID NO: 2518 - protein, 19 aa, Mycobacterium leprae
DAWREGEEFVVEFDLPGIK

SEQ ID NO: 2519 - protein, 20 aa, Mycobacterium tuberculosis
DGNPPEVKSVGLGNVNGVTL

SEQ ID NO: 2520 - protein, 16 aa, Mycobacterium tuberculosis
DLSLLGKARKVVVTKD

SEQ ID NO: 2521 - protein, 12 aa, Human alphaherpesvirus sp.
DSELEIKRYKNR

SEQ ID NO: 2522 - protein, 15 aa, Homo sapiens
DTQFVRFDSDAASQR

SEQ ID NO: 2523 - protein, 15 aa, Mycobacterium bovis
DVEGEALSTLVVNKI

SEQ ID NO: 2524 - protein, 15 aa, Mycobacterium tuberculosis
EESNTFGLQLELTEG

SEQ ID NO: 2525 - protein, 9 aa, Human alphaherpesvirus sp.
ELKRKMIYM

SEQ ID NO: 2526 - protein, 15 aa, Homo sapiens
ENPVVHFFKNIVTPR

SEQ ID NO: 2527 - protein, 11 aa, Human alphaherpesvirus sp.
EPLPQGQLTAY

SEQ ID NO: 2528 - protein, 6 aa, Proteus mirabilis
ESRRAL

SEQ ID NO: 2529 - protein, 16 aa, Homo sapiens
FDQKIVEWDSRKSKYF

SEQ ID NO: 2530 - protein, 9 aa, Human alphaherpesvirus sp.
FLRGRAYGL

SEQ ID NO: 2531 - protein, 18 aa, Homo sapiens
FPKPPSYNVATTLPSYDE

SEQ ID NO: 2532 - protein, 20 aa, Human alphaherpesvirus sp.
GAGGGAGGAGAGGGAGGAGA

SEQ ID NO: 2533 - protein, 24 aa, Human alphaherpesvirus sp.
GGDNHGRGRGRGRGRGGGRPGAPG

SEQ ID NO: 2534 - protein, 24 aa, Human alphaherpesvirus sp.
GGDNHGRGRGRGRGRGGGRPGAPG

SEQ ID NO: 2535 - protein, 24 aa, Human alphaherpesvirus sp.
GGDNHGRGRGRGRGRGGGRPGAPG

SEQ ID NO: 2536 - protein, 24 aa, Human alphaherpesvirus sp.
GGDNHGRGRGRGRGRGGGRPGAPG

SEQ ID NO: 2537 - protein, 15 aa, Phaseolus vulgaris
GGYGDGGAHGGGYGG

SEQ ID NO: 2538 - protein, 9 aa, Human alphaherpesvirus sp.
GLCTLVAML

SEQ ID NO: 2539 - protein, 10 aa, Mycobacterium tuberculosis
GLEPGVVAEK

SEQ ID NO: 2540 - protein, 11 aa, Mycobacterium tuberculosis
GLEPGVVAEKV

SEQ ID NO: 2541 - protein, 16 aa, Mycobacterium leprae
GMEPGVVAEKVRNLSV

SEQ ID NO: 2542 - protein, 15 aa, Mycobacterium tuberculosis
IAFNSGLEPGVVAEK

SEQ ID NO: 2543 - protein, 16 aa, Mycobacterium leprae
IAFNSGMEPGVVAEKV

SEQ ID NO: 2544 - protein, 20 aa, Mycobacterium tuberculosis
IAIGGAATGIAAVLTDGNPP

SEQ ID NO: 2545 - protein, 15 aa, Homo sapiens
KDLLEQKRAAVDTYC

SEQ ID NO: 2546 - protein, 14 aa, Human alphaherpesvirus sp.
KGGWFGKHRGQGGS

SEQ ID NO: 2547 - protein, 22 aa, Human alphaherpesvirus sp.
KKEEKKEESEEEDEDMGFGLFD

SEQ ID NO: 2548 - protein, 9 aa, Human alphaherpesvirus sp.
KRKMIYMCY

SEQ ID NO: 2549 - protein, 9 aa, Human alphaherpesvirus sp.
KRPPIFIRR

SEQ ID NO: 2550 - protein, 9 aa, Human alphaherpesvirus sp.
LLWTLVVLL

SEQ ID NO: 2551 - protein, 15 aa, Mycobacterium tuberculosis
MAKTIAYDEEARRGL

SEQ ID NO: 2552 - protein, 15 aa, Mycobacterium tuberculosis
MSPVNKSFEIEVTCS

SEQ ID NO: 2553 - protein, 9 aa, Human alphaherpesvirus sp.
NLVPMVATV

SEQ ID NO: 2554 - protein, 13 aa, Human alphaherpesvirus sp.
PKYVKQNTLKLAT

SEQ ID NO: 2555 - protein, 13 aa, unidentified
  REGION 1..13: note = epitope involved in rheumatoid arthritis
PKYVKRNTLKLAT

SEQ ID NO: 2556 - protein, 12 aa, Clostridium tetani
PLYKKMEAVKLR

SEQ ID NO: 2557 - protein, 15 aa, Mycobacterium sp.
PYILLVSSKVSTVKD

SEQ ID NO: 2558 - protein, 16 aa, Homo sapiens
QPHDLGKVGEVIVTKD

SEQ ID NO: 2559 - protein, 8 aa, Human alphaherpesvirus sp.
RAKFKQLL

SEQ ID NO: 2560 - protein, 14 aa, Human alphaherpesvirus sp.
RARGRGRGRGEKRP

SEQ ID NO: 2561 - protein, 15 aa, Human alphaherpesvirus sp.
RRGRGRERARGGSRE

SEQ ID NO: 2562 - protein, 9 aa, Human alphaherpesvirus sp.
RRIEEICMK

SEQ ID NO: 2563 - protein, 9 aa, Human alphaherpesvirus sp.
RRLVVTLQC

SEQ ID NO: 2564 - protein, 9 aa, Human alphaherpesvirus sp.
SENDRLRLL

SEQ ID NO: 2565 - protein, 20 aa, Mycobacterium tuberculosis
SGETTTAAGTTASPGAASGP

SEQ ID NO: 2566 - protein, 13 aa, Human alphaherpesvirus sp.
SGPLKAEIAQRLE

SEQ ID NO: 2567 - protein, 7 aa, Mus musculus
SLAYGLR

SEQ ID NO: 2568 - protein, 16 aa, Mycobacterium tuberculosis
SVAVKAPGFGDRRKAM

SEQ ID NO: 2569 - protein, 9 aa, Human alphaherpesvirus sp.
SVRDRLARL

SEQ ID NO: 2570 - protein, 9 aa, unidentified
  REGION 1..9: note = epitope involved in rheumatoid arthritis
TFGAQLELT

SEQ ID NO: 2571 - protein, 9 aa, Mycobacterium tuberculosis
TFGLQLELT

SEQ ID NO: 2572 - protein, 15 aa, Human alphaherpesvirus sp.
TNSHVPILQERPPLE

SEQ ID NO: 2573 - protein, 20 aa, Mycobacterium tuberculosis
VAGLSGCSSNKSTTGSGETT

SEQ ID NO: 2574 - protein, 17 aa, Homo sapiens
VDDTQFVRFDSDAASQR

SEQ ID NO: 2575 - protein, 19 aa, Homo sapiens
VDDTQFVRFDSDAASQRME

SEQ ID NO: 2576 - protein, 20 aa, Homo sapiens
VDDTQFVRFDSDAASQRMEP

SEQ ID NO: 2577 - protein, 21 aa, Homo sapiens
VDDTQFVRFDSDAASQRMEPR

SEQ ID NO: 2578 - protein, 20 aa, Mycobacterium tuberculosis
VTGSVVCTTAAGNVNIAIGG

SEQ ID NO: 2579 - protein, 15 aa, Mycobacterium bovis
VVAEKVRNLPAGHGL

SEQ ID NO: 2580 - protein, 9 aa, Human alphaherpesvirus sp.
YVLDHLIVV

SEQ ID NO: 2581 - protein, 20 aa, Homo sapiens
KFGADARALMLQGVDLLADA

SEQ ID NO: 2582 - protein, 22 aa, Human alphaherpesvirus sp.
GGAGAGGGAGGAGAGGGAGGAG

SEQ ID NO: 2583 - protein, 11 aa, Homo sapiens
GLKGEQGEPGA

SEQ ID NO: 2584 - protein, 11 aa, Gallus gallus
IAGFKGEQGPK

SEQ ID NO: 2585 - protein, 20 aa, Mycobacterium tuberculosis
MKRGLTVAVAGAAILVAGLS

SEQ ID NO: 2586 - protein, 20 aa, Mycobacterium tuberculosis
NGVTLGYTSGTCQGNASATK

SEQ ID NO: 2587 - protein, 26 aa, Gallus gallus
PTGPLGPKGQTGELGIAGFKGEQGPK

SEQ ID NO: 2588 - protein, 9 aa, unidentified
  REGION 1..9: note = epitope involved in rheumatoid arthritis
ADGGAQGTA

SEQ ID NO: 2589 - protein, 12 aa, unidentified
  REGION 1..12: note = epitope involved in rheumatoid arthritis
ADIWLTPDPTTP

SEQ ID NO: 2590 - protein, 15 aa, Homo sapiens
CVDTRSGNCYLDIRP

SEQ ID NO: 2591 - protein, 12 aa, unidentified
  REGION 1..12: note = epitope involved in rheumatoid arthritis
DVYWLMPDPPTS

SEQ ID NO: 2592 - protein, 15 aa, Homo sapiens
EPVSGSFTTALDGPS

SEQ ID NO: 2593 - protein, 15 aa, Homo sapiens
FFYFFTGSSQLEFDP

SEQ ID NO: 2594 - protein, 15 aa, Rattus norvegicus
GIAGFKGEQGPKGET

SEQ ID NO: 2595 - protein, 21 aa, Homo sapiens
GPKGQTGEPGIAGFKGEQGPK

SEQ ID NO: 2596 - protein, 21 aa, Homo sapiens
GPKGQTGKPGIAGFKGEQGPK

SEQ ID NO: 2597 - protein, 12 aa, unidentified
  REGION 1..12: note = epitope involved in rheumatoid arthritis
GTSTEVWLAPDP

SEQ ID NO: 2598 - protein, 15 aa, Homo sapiens
GVVSHSFPATLETQE

SEQ ID NO: 2599 - protein, 12 aa, unidentified
  REGION 1..12: note = epitope involved in rheumatoid arthritis
HLPSFLRPDPPL

SEQ ID NO: 2600 - protein, 12 aa, unidentified
  REGION 1..12: note = epitope involved in rheumatoid arthritis
IFPSFLRPDPPL

SEQ ID NO: 2601 - protein, 15 aa, Homo sapiens
ISGLPSGGDDLETST

SEQ ID NO: 2602 - protein, 15 aa, Homo sapiens
IWYINCFGCETHAML

SEQ ID NO: 2603 - protein, 15 aa, Homo sapiens
LSGLPSGGEVLEISV

SEQ ID NO: 2604 - protein, 9 aa, unidentified
  REGION 1..9: note = epitope involved in rheumatoid arthritis
LSSREPQAR

SEQ ID NO: 2605 - protein, 11 aa, Rattus norvegicus
LVGPRGERGFP

SEQ ID NO: 2606 - protein, 17 aa, Homo sapiens
NEEGFFSARGHRPLDKK

SEQ ID NO: 2607 - protein, 12 aa, unidentified
  REGION 1..12: note = epitope involved in rheumatoid arthritis
NSDHFLQPDPPL

SEQ ID NO: 2608 - protein, 9 aa, unidentified
  REGION 1..9: note = epitope involved in rheumatoid arthritis
PGPSRAHFL

SEQ ID NO: 2609 - protein, 15 aa, Escherichia coli
QKRAAYDQYGHAAFE

SEQ ID NO: 2610 - protein, 9 aa, unidentified
  REGION 1..9: note = epitope involved in rheumatoid arthritis
RLTRELYAQ

SEQ ID NO: 2611 - protein, 13 aa, Homo sapiens
RSFTLASSETGVG

SEQ ID NO: 2612 - protein, 15 aa, Homo sapiens
VKEGHSPPDDVDIVI

SEQ ID NO: 2613 - protein, 16 aa, Homo sapiens
VYATRSSAVRLRSSVP

SEQ ID NO: 2614 - protein, 9 aa, unidentified
  REGION 1..9: note = epitope involved in rheumatoid arthritis
YTQKHKHQA

SEQ ID NO: 2615 - protein, 13 aa, Bos taurus
AGFKGEQGPKGEP

SEQ ID NO: 2616 - protein, 11 aa, Homo sapiens
ARGLTGRPGDA

SEQ ID NO: 2617 - protein, 15 aa, Mus musculus
ATEGQVRVNSIYQDK

SEQ ID NO: 2618 - protein, 15 aa, Bos taurus
ATYKRRLQKRSSRPL

SEQ ID NO: 2619 - protein, 21 aa, unidentified
  REGION 1..21: note = epitope involved in rheumatoid arthritis
GEPGIAGFKGDQGPKGEPGPA

SEQ ID NO: 2620 - protein, 12 aa, Rattus norvegicus
GIAGFKGEQGPK

SEQ ID NO: 2621 - protein, 15 aa, Rattus norvegicus
GIAGFKGEQGPKGET

SEQ ID NO: 2622 - protein, 8 aa, Homo sapiens
LKFVEQNE

SEQ ID NO: 2623 - protein, 15 aa, Mus musculus
NTYKHRLQKRTMRPT

SEQ ID NO: 2624 - protein, 13 aa, Homo sapiens
PTFGRSFTLASSE

SEQ ID NO: 2625 - protein, 26 aa, unidentified
  REGION 1..26: note = epitope involved in rheumatoid arthritis
PTGPLGPKGQTGELGAPGNKGEQGPK

SEQ ID NO: 2626 - protein, 14 aa, Homo sapiens
SQRFSKIASNTQSR

SEQ ID NO: 2627 - protein, 15 aa, Canis lupus
STYKRRLQKRSSRAP

SEQ ID NO: 2628 - protein, 20 aa, Homo sapiens
TGEPGIAGFKGEQGPKGEPG

SEQ ID NO: 2629 - protein, 15 aa, unidentified
  REGION 1..15: note = epitope involved in rheumatoid arthritis
TTYKRRLQKRAARHP

SEQ ID NO: 2630 - protein, 9 aa, Homo sapiens
TYKRRLQKR

SEQ ID NO: 2631 - protein, 14 aa, Sus scrofa
TYKRRLQKRSSRSL

SEQ ID NO: 2632 - protein, 13 aa, Homo sapiens
VGYDDQESVKSKV

SEQ ID NO: 2633 - protein, 18 aa, Homo sapiens
AGMDMCSAGWLADRSVRY

SEQ ID NO: 2634 - protein, 7 aa, Homo sapiens
ALPAPIE

SEQ ID NO: 2635 - protein, 7 aa, Homo sapiens
APIEKTI

SEQ ID NO: 2636 - protein, 7 aa, Homo sapiens
CKVSNKA

SEQ ID NO: 2637 - protein, 7 aa, Homo sapiens
DGKEYKC

SEQ ID NO: 2638 - protein, 7 aa, Homo sapiens
DVSHEDP

SEQ ID NO: 2639 - protein, 7 aa, Homo sapiens
EDPQVKF

SEQ ID NO: 2640 - protein, 7 aa, Homo sapiens
EKTISKA

SEQ ID NO: 2641 - protein, 6 aa, Homo sapiens
EQRRAA

SEQ ID NO: 2642 - protein, 7 aa, Homo sapiens
EYKCKVS

SEQ ID NO: 2643 - protein, 7 aa, Homo sapiens
FLFPPKP

SEQ ID NO: 2644 - protein, 7 aa, Homo sapiens
FNWYVDG

SEQ ID NO: 2645 - protein, 7 aa, Homo sapiens
FPPKPKD

SEQ ID NO: 2646 - protein, 16 aa, Bos taurus
GARGPEGAQGPRGEPG

SEQ ID NO: 2647 - protein, 15 aa, Bos taurus
GEPGIAGFKGEQGPK

SEQ ID NO: 2648 - protein, 15 aa, Rattus norvegicus
GEPGIAGFKGEQGPK

SEQ ID NO: 2649 - protein, 15 aa, Rattus norvegicus
GEPGIAGFKGEQGPK

SEQ ID NO: 2650 - protein, 7 aa, Homo sapiens
GKEYKCK

SEQ ID NO: 2651 - protein, 16 aa, Homo sapiens
GKPGIAGFKGEQGPKG

SEQ ID NO: 2652 - protein, 16 aa, Homo sapiens
GNQWVGYDDQESVKSK

SEQ ID NO: 2653 - protein, 7 aa, Homo sapiens
GPSVFLF

SEQ ID NO: 2654 - protein, 11 aa, Homo sapiens
GRGDSVVYGLR

SEQ ID NO: 2655 - protein, 16 aa, Homo sapiens
GRSFTLASSETGVGAP

SEQ ID NO: 2656 - protein, 15 aa, Homo sapiens
GTSLTIPCYFIDPMH

SEQ ID NO: 2657 - protein, 7 aa, Homo sapiens
GVQVHNA

SEQ ID NO: 2658 - protein, 7 aa, Homo sapiens
HQNWLDG

SEQ ID NO: 2659 - protein, 7 aa, Homo sapiens
IEKTISK

SEQ ID NO: 2660 - protein, 7 aa, Homo sapiens
ISKAKGQ

SEQ ID NO: 2661 - protein, 7 aa, Homo sapiens
KALPAPI

SEQ ID NO: 2662 - protein, 7 aa, Homo sapiens
KCKVSNK

SEQ ID NO: 2663 - protein, 7 aa, Homo sapiens
KEYKCKV

SEQ ID NO: 2664 - protein, 7 aa, Homo sapiens
KFNWYVD

SEQ ID NO: 2665 - protein, 15 aa, Gallus gallus
KGQTGELGIAGFKGE

SEQ ID NO: 2666 - protein, 7 aa, Homo sapiens
KPREQQY

SEQ ID NO: 2667 - protein, 7 aa, Homo sapiens
KTISKAK

SEQ ID NO: 2668 - protein, 7 aa, Homo sapiens
KTKPREQ

SEQ ID NO: 2669 - protein, 7 aa, Homo sapiens
KVSNKAL

SEQ ID NO: 2670 - protein, 7 aa, Homo sapiens
LDGKEYK

SEQ ID NO: 2671 - protein, 7 aa, Homo sapiens
LFPPKPK

SEQ ID NO: 2672 - protein, 33 aa, Homo sapiens
LGPKGQTGEPGIAGFKGEQGPKGEPGPAGPQGA

SEQ ID NO: 2673 - protein, 7 aa, Homo sapiens
LHQNWLD

SEQ ID NO: 2674 - protein, 7 aa, Homo sapiens
LPAPIEK

SEQ ID NO: 2675 - protein, 7 aa, Homo sapiens
LTVLHQN

SEQ ID NO: 2676 - protein, 16 aa, Homo sapiens
MGIPTFGRSFTLASSE

SEQ ID NO: 2677 - protein, 7 aa, Homo sapiens
NAKTKPR

SEQ ID NO: 2678 - protein, 16 aa, Homo sapiens
NFGSQRFSKIASNTQS

SEQ ID NO: 2679 - protein, 7 aa, Homo sapiens
NKALPAP

SEQ ID NO: 2680 - protein, 7 aa, Homo sapiens
NSTYRVV

SEQ ID NO: 2681 - protein, 7 aa, Homo sapiens
NWLDGKE

SEQ ID NO: 2682 - protein, 7 aa, Homo sapiens
NWYVDGV

SEQ ID NO: 2683 - protein, 7 aa, Homo sapiens
PAPIEKT

SEQ ID NO: 2684 - protein, 7 aa, Homo sapiens
PIEKTIS

SEQ ID NO: 2685 - protein, 7 aa, Homo sapiens
PQVKFNW

SEQ ID NO: 2686 - protein, 7 aa, Homo sapiens
PREQQYN

SEQ ID NO: 2687 - protein, 7 aa, Homo sapiens
PSVFLFP

SEQ ID NO: 2688 - protein, 16 aa, Homo sapiens
QHLDFISIMTYDFHGA

SEQ ID NO: 2689 - protein, 7 aa, Homo sapiens
QNWLDGK

SEQ ID NO: 2690 - protein, 7 aa, Homo sapiens
QQYNSTY

SEQ ID NO: 2691 - protein, 7 aa, Homo sapiens
QVKFNWY

SEQ ID NO: 2692 - protein, 16 aa, Homo sapiens
QWVGYDDQESVKSKVQ

SEQ ID NO: 2693 - protein, 7 aa, Homo sapiens
QYNSTYR

SEQ ID NO: 2694 - protein, 7 aa, Homo sapiens
REQQYNS

SEQ ID NO: 2695 - protein, 7 aa, Homo sapiens
RVVSVLT

SEQ ID NO: 2696 - protein, 16 aa, Homo sapiens
SCFPDALDRFLCTHII

SEQ ID NO: 2697 - protein, 7 aa, Homo sapiens
SNKALPA

SEQ ID NO: 2698 - protein, 7 aa, Homo sapiens
SVFLFPP

SEQ ID NO: 2699 - protein, 7 aa, Homo sapiens
SVLTVLH

SEQ ID NO: 2700 - protein, 7 aa, Homo sapiens
TISKAKG

SEQ ID NO: 2701 - protein, 7 aa, Homo sapiens
TVLHQNW

SEQ ID NO: 2702 - protein, 7 aa, Homo sapiens
TYRVVSV

SEQ ID NO: 2703 - protein, 7 aa, Homo sapiens
VDGVQVH

SEQ ID NO: 2704 - protein, 7 aa, Homo sapiens
VFLFPPK

SEQ ID NO: 2705 - protein, 7 aa, Homo sapiens
VHNAKTK

SEQ ID NO: 2706 - protein, 7 aa, Homo sapiens
VKFNWYV

SEQ ID NO: 2707 - protein, 7 aa, Homo sapiens
VLHQNWL

SEQ ID NO: 2708 - protein, 7 aa, Homo sapiens
VSNKALP

SEQ ID NO: 2709 - protein, 7 aa, Homo sapiens
VSVLTVL

SEQ ID NO: 2710 - protein, 18 aa, Homo sapiens
VVLLVATEGRVRVNSAYQ

SEQ ID NO: 2711 - protein, 7 aa, Homo sapiens
VVSVLTV

SEQ ID NO: 2712 - protein, 18 aa, Homo sapiens
VVVKGIVFHYRAISTRYT

SEQ ID NO: 2713 - protein, 7 aa, Homo sapiens
WLDGKEY

SEQ ID NO: 2714 - protein, 7 aa, Homo sapiens
WYVDGVQ

SEQ ID NO: 2715 - protein, 7 aa, Homo sapiens
YKCKVSN

SEQ ID NO: 2716 - protein, 15 aa, Homo sapiens
YLAWQAGMDMCSAGW

SEQ ID NO: 2717 - protein, 7 aa, Homo sapiens
YNSTYRV

SEQ ID NO: 2718 - protein, 7 aa, Homo sapiens
YRVVSVL

SEQ ID NO: 2719 - protein, 7 aa, Homo sapiens
YVDGVQV

SEQ ID NO: 2720 - protein, 9 aa, Human alphaherpesvirus sp.
AARQRLQDI

SEQ ID NO: 2721 - protein, 13 aa, Homo sapiens
AGWLADGSLRYPI

SEQ ID NO: 2722 - protein, 13 aa, Homo sapiens
AGWLADQTVRYPI

SEQ ID NO: 2723 - protein, 14 aa, Homo sapiens
ARGAQGPPGATGFP

SEQ ID NO: 2724 - protein, 18 aa, Homo sapiens
ATLEVQSLRSNDSGVYRC

SEQ ID NO: 2725 - protein, 10 aa, unidentified
  REGION 1..10: note = epitope involved in rheumatoid arthritis
AWNCCVKQTP

SEQ ID NO: 2726 - protein, 20 aa, Mycobacterium tuberculosis
AYDEEARRGLERGLNALADA

SEQ ID NO: 2727 - protein, 9 aa, Human alphaherpesvirus sp.
CLGGLLTMN

SEQ ID NO: 2728 - protein, 7 aa, Homo sapiens
CSVMHEG

SEQ ID NO: 2729 - protein, 11 aa, Homo sapiens
DAGPQGKVGPS

SEQ ID NO: 2730 - protein, 7 aa, Homo sapiens
DGSFFLY

SEQ ID NO: 2731 - protein, 18 aa, Homo sapiens
DSGHRGYSGSQASDNEGH

SEQ ID NO: 2732 - protein, 9 aa, Porphyromonas gingivalis
DSRGNPTVE

SEQ ID NO: 2733 - protein, 7 aa, Homo sapiens
EGLHNHY

SEQ ID NO: 2734 - protein, 11 aa, Homo sapiens
ERGLKGHRGFT

SEQ ID NO: 2735 - protein, 11 aa, Homo sapiens
GGQGSRHQQAR

SEQ ID NO: 2736 - protein, 14 aa, Homo sapiens
GGVGPIGPPGERGA

SEQ ID NO: 2737 - protein, 9 aa, Bos taurus
GPAGPAGER

SEQ ID NO: 2738 - protein, 9 aa, Human alphaherpesvirus sp.
GPKVKRPPI

SEQ ID NO: 2739 - protein, 11 aa, unidentified
  REGION 1..11: note = epitope involved in rheumatoid arthritis
GWVAMHPQGDL

SEQ ID NO: 2740 - protein, 21 aa, Homo sapiens
HQCHQESTRGRSRGRCGRSGS

SEQ ID NO: 2741 - protein, 18 aa, Homo sapiens
HSASQDGQDTIRGHPGSS

SEQ ID NO: 2742 - protein, 22 aa, Homo sapiens
HSGIGHGQASSAVRDSGHRGYS

SEQ ID NO: 2743 - protein, 17 aa, Homo sapiens
HSTSQEGQDTIHGHRGS

SEQ ID NO: 2744 - protein, 7 aa, Homo sapiens
KSLSLSP

SEQ ID NO: 2745 - protein, 20 aa, Homo sapiens
LGLRLIYFSYDVKMKEKGDI

SEQ ID NO: 2746 - protein, 10 aa, unidentified
  REGION 1..10: note = epitope involved in rheumatoid arthritis
LGWMRYHPQA

SEQ ID NO: 2747 - protein, 10 aa, Human alphaherpesvirus sp.
LLDFVRFMGY

SEQ ID NO: 2748 - protein, 10 aa, unidentified
  REGION 1..10: note = epitope involved in rheumatoid arthritis
LLPWLDGHPM

SEQ ID NO: 2749 - protein, 10 aa, Homo sapiens
LLRGYHQDAY

SEQ ID NO: 2750 - protein, 11 aa, Homo sapiens
LVGPRGERGFP

SEQ ID NO: 2751 - protein, 10 aa, unidentified
  REGION 1..10: note = epitope involved in rheumatoid arthritis
NWLSLITAAR

SEQ ID NO: 2752 - protein, 13 aa, Homo sapiens
PEFSGLPSGIAEV

SEQ ID NO: 2753 - protein, 15 aa, Mus musculus
PPGANGNPGPAGPPG

SEQ ID NO: 2754 - protein, 9 aa, Homo sapiens
PPGPTGASG

SEQ ID NO: 2755 - protein, 7 aa, Homo sapiens
PQVYTLP

SEQ ID NO: 2756 - protein, 7 aa, Homo sapiens
PREPQVY

SEQ ID NO: 2757 - protein, 11 aa, Homo sapiens
QGKVGPSGAPG

SEQ ID NO: 2758 - protein, 9 aa, Human alphaherpesvirus sp.
QLLQHYREV

SEQ ID NO: 2759 - protein, 18 aa, Homo sapiens
RGFTGLQGLPGPPGPSGD

SEQ ID NO: 2760 - protein, 9 aa, unidentified
  REGION 1..9: note = epitope involved in rheumatoid arthritis
RRLPFGSQM

SEQ ID NO: 2761 - protein, 15 aa, Homo sapiens
RVAEQLRAYLEGECV

SEQ ID NO: 2762 - protein, 19 aa, Homo sapiens
SGFQGLPGPPGPPGEGGGK

SEQ ID NO: 2763 - protein, 19 aa, Homo sapiens
SHQESTRGRSRGRSGRSGS

SEQ ID NO: 2764 - protein, 10 aa, unidentified
  REGION 1..10: note = epitope involved in rheumatoid arthritis
SIFFAVVLEL

SEQ ID NO: 2765 - protein, 10 aa, unidentified
  REGION 1..10: note = epitope involved in rheumatoid arthritis
SLCINLRAAR

SEQ ID NO: 2766 - protein, 11 aa, unidentified
  REGION 1..11: note = epitope involved in rheumatoid arthritis
SLITAARGAPS

SEQ ID NO: 2767 - protein, 17 aa, Homo sapiens
SMNVEVTDKGDVPEGYK

SEQ ID NO: 2768 - protein, 17 aa, Homo sapiens
SQIVNDFQKGDIAEGYS

SEQ ID NO: 2769 - protein, 10 aa, unidentified
  REGION 1..10: note = epitope involved in rheumatoid arthritis
VDLMTIRSCR

SEQ ID NO: 2770 - protein, 9 aa, Human alphaherpesvirus sp.
VMATLLPPV

SEQ ID NO: 2771 - protein, 13 aa, Homo sapiens
WDRETQICKAKAQ

SEQ ID NO: 2772 - protein, 10 aa, unidentified
  REGION 1..10: note = epitope involved in rheumatoid arthritis
WFTSWERDWW

SEQ ID NO: 2773 - protein, 10 aa, unidentified
  REGION 1..10: note = epitope involved in rheumatoid arthritis
WPPSFWYHPQ

SEQ ID NO: 2774 - protein, 10 aa, unidentified
  REGION 1..10: note = epitope involved in rheumatoid arthritis
WVAMHPQGDL

SEQ ID NO: 2775 - protein, 10 aa, unidentified
  REGION 1..10: note = epitope involved in rheumatoid arthritis
WWATFFEATR

SEQ ID NO: 2776 - protein, 10 aa, unidentified
  REGION 1..10: note = epitope involved in rheumatoid arthritis
WWNMFQMGVV

SEQ ID NO: 2777 - protein, 9 aa, unidentified
  REGION 1..9: note = epitope involved in rheumatoid arthritis
AAFSELPLG

SEQ ID NO: 2778 - protein, 9 aa, unidentified
  REGION 1..9: note = epitope involved in rheumatoid arthritis
ADASVPVMP

SEQ ID NO: 2779 - protein, 15 aa, Bos taurus
AGFKGEQGPKGEPGP

SEQ ID NO: 2780 - protein, 18 aa, Homo sapiens
AGFKGEQGPKGEPGPAGP

SEQ ID NO: 2781 - protein, 18 aa, Homo sapiens
AGFKGEQGPKGEPGPAGP

SEQ ID NO: 2782 - protein, 9 aa, unidentified
  REGION 1..9: note = epitope involved in rheumatoid arthritis
AKYSNQRAQ

SEQ ID NO: 2783 - protein, 9 aa, unidentified
  REGION 1..9: note = epitope involved in rheumatoid arthritis
ALARLMPGS

SEQ ID NO: 2784 - protein, 9 aa, unidentified
  REGION 1..9: note = epitope involved in rheumatoid arthritis
APRRLFDIA

SEQ ID NO: 2785 - protein, 9 aa, unidentified
  REGION 1..9: note = epitope involved in rheumatoid arthritis
APSSLAGNG

SEQ ID NO: 2786 - protein, 9 aa, unidentified
  REGION 1..9: note = epitope involved in rheumatoid arthritis
AQAYDLSPS

SEQ ID NO: 2787 - protein, 9 aa, unidentified
  REGION 1..9: note = epitope involved in rheumatoid arthritis
AQSAITACW

SEQ ID NO: 2788 - protein, 9 aa, unidentified
  REGION 1..9: note = epitope involved in rheumatoid arthritis
ASKAKARPV

SEQ ID NO: 2789 - protein, 9 aa, unidentified
  REGION 1..9: note = epitope involved in rheumatoid arthritis
ATADYPQKS

SEQ ID NO: 2790 - protein, 9 aa, unidentified
  REGION 1..9: note = epitope involved in rheumatoid arthritis
ATNIFIEGT

SEQ ID NO: 2791 - protein, 9 aa, unidentified
  REGION 1..9: note = epitope involved in rheumatoid arthritis
CTRHPDCQA

SEQ ID NO: 2792 - protein, 16 aa, Homo sapiens
DDTQFVRFDSDAASPR

SEQ ID NO: 2793 - protein, 16 aa, Homo sapiens
DLRSWTAADTAAQITQ

SEQ ID NO: 2794 - protein, 17 aa, Homo sapiens
DLSSWTAADTAAQITQR

SEQ ID NO: 2795 - protein, 15 aa, Homo sapiens
DNPEYSPDPSIYAYD

SEQ ID NO: 2796 - protein, 18 aa, Bos taurus
EPGIAGFKGEQGPKGEPG

SEQ ID NO: 2797 - protein, 9 aa, unidentified
  REGION 1..9: note = epitope involved in rheumatoid arthritis
EQAQSQTLP

SEQ ID NO: 2798 - protein, 9 aa, unidentified
  REGION 1..9: note = epitope involved in rheumatoid arthritis
EVAHPSVPL

SEQ ID NO: 2799 - protein, 15 aa, Homo sapiens
FEDMAKSDKARYDRE

SEQ ID NO: 2800 - protein, 17 aa, Homo sapiens
FLAEGGGVRGPRVVERH

SEQ ID NO: 2801 - protein, 12 aa, Homo sapiens
FVRFDSDAASPR

SEQ ID NO: 2802 - protein, 11 aa, Homo sapiens
FVRFDSDAASQ

SEQ ID NO: 2803 - protein, 13 aa, Homo sapiens
FVRFDSDAASQRM

SEQ ID NO: 2804 - protein, 9 aa, unidentified
  REGION 1..9: note = epitope involved in rheumatoid arthritis
GASGDIAKQ

SEQ ID NO: 2805 - protein, 9 aa, unidentified
  REGION 1..9: note = epitope involved in rheumatoid arthritis
GGETLLHMA

SEQ ID NO: 2806 - protein, 15 aa, Homo sapiens
GIAGFKGEQGPKGEP

SEQ ID NO: 2807 - protein, 15 aa, Homo sapiens
GIAGFKGEQGPKGEP

SEQ ID NO: 2808 - protein, 15 aa, Rattus norvegicus
GIAGFKGEQGPKGET

SEQ ID NO: 2809 - protein, 15 aa, Bos taurus
GPEGAQGPRGEPGTP

SEQ ID NO: 2810 - protein, 9 aa, unidentified
  REGION 1..9: note = epitope involved in rheumatoid arthritis
GPPRRLIDT

SEQ ID NO: 2811 - protein, 9 aa, unidentified
  REGION 1..9: note = epitope involved in rheumatoid arthritis
GRTPEDNTL

SEQ ID NO: 2812 - protein, 9 aa, unidentified
  REGION 1..9: note = epitope involved in rheumatoid arthritis
GWPVAPDPA

SEQ ID NO: 2813 - protein, 9 aa, unidentified
  REGION 1..9: note = epitope involved in rheumatoid arthritis
HAKKTPPAS

SEQ ID NO: 2814 - protein, 9 aa, unidentified
  REGION 1..9: note = epitope involved in rheumatoid arthritis
HELGDIAIA

SEQ ID NO: 2815 - protein, 9 aa, unidentified
  REGION 1..9: note = epitope involved in rheumatoid arthritis
HLRQGRNTA

SEQ ID NO: 2816 - protein, 21 aa, unidentified
  REGION 1..21: note = epitope involved in rheumatoid arthritis
HQCHQESTRGRSRGRCGRSGS

SEQ ID NO: 2817 - protein, 9 aa, unidentified
  REGION 1..9: note = epitope involved in rheumatoid arthritis
IRRSETPRA

SEQ ID NO: 2818 - protein, 9 aa, unidentified
  REGION 1..9: note = epitope involved in rheumatoid arthritis
IRYHTNWSS

SEQ ID NO: 2819 - protein, 19 aa, Homo sapiens
IYFRNQKGHSGLQPTGFLS

SEQ ID NO: 2820 - protein, 19 aa, Homo sapiens
IYFRNQKGHSGLQPTGLLS

SEQ ID NO: 2821 - protein, 15 aa, Homo sapiens
KEKSKFEDMAKSDKA

SEQ ID NO: 2822 - protein, 15 aa, Homo sapiens
KHKVYACEVTHQGLS

SEQ ID NO: 2823 - protein, 16 aa, Homo sapiens
KIHAREIFDSRGNPTV

SEQ ID NO: 2824 - protein, 15 aa, Homo sapiens
KKGKKKDPNAPKRPP

SEQ ID NO: 2825 - protein, 9 aa, unidentified
  REGION 1..9: note = epitope involved in rheumatoid arthritis
KMPIEADPL

SEQ ID NO: 2826 - protein, 15 aa, Homo sapiens
KSDKARYDREMKNYV

SEQ ID NO: 2827 - protein, 9 aa, unidentified
  REGION 1..9: note = epitope involved in rheumatoid arthritis
KSGPIDIIG

SEQ ID NO: 2828 - protein, 15 aa, Homo sapiens
KTMSAKEKSKFEDMA

SEQ ID NO: 2829 - protein, 9 aa, unidentified
  REGION 1..9: note = epitope involved in rheumatoid arthritis
LGLHALQSP

SEQ ID NO: 2830 - protein, 9 aa, unidentified
  REGION 1..9: note = epitope involved in rheumatoid arthritis
LGRDANAWK

SEQ ID NO: 2831 - protein, 9 aa, unidentified
  REGION 1..9: note = epitope involved in rheumatoid arthritis
LLRPVARDT

SEQ ID NO: 2832 - protein, 9 aa, unidentified
  REGION 1..9: note = epitope involved in rheumatoid arthritis
LNTAKHRES

SEQ ID NO: 2833 - protein, 13 aa, Homo sapiens
LPSYEEALSLPSK

SEQ ID NO: 2834 - protein, 9 aa, unidentified
  REGION 1..9: note = epitope involved in rheumatoid arthritis
LSRASLKTL

SEQ ID NO: 2835 - protein, 15 aa, Homo sapiens
LSSWTAADTAAQITQ

SEQ ID NO: 2836 - protein, 9 aa, unidentified
  REGION 1..9: note = epitope involved in rheumatoid arthritis
LVGTPQKTK

SEQ ID NO: 2837 - protein, 15 aa, Homo sapiens
MKNYVPPKGDKKGKK

SEQ ID NO: 2838 - protein, 9 aa, unidentified
  REGION 1..9: note = epitope involved in rheumatoid arthritis
NKALTFFLP

SEQ ID NO: 2839 - protein, 9 aa, unidentified
  REGION 1..9: note = epitope involved in rheumatoid arthritis
NLFTQTGTP

SEQ ID NO: 2840 - protein, 9 aa, unidentified
  REGION 1..9: note = epitope involved in rheumatoid arthritis
NNSFEKVKQ

SEQ ID NO: 2841 - protein, 9 aa, unidentified
  REGION 1..9: note = epitope involved in rheumatoid arthritis
NSSPYLNTK

SEQ ID NO: 2842 - protein, 9 aa, unidentified
  REGION 1..9: note = epitope involved in rheumatoid arthritis
PDHLPRHVS

SEQ ID NO: 2843 - protein, 9 aa, unidentified
  REGION 1..9: note = epitope involved in rheumatoid arthritis
PEIIENFDP

SEQ ID NO: 2844 - protein, 9 aa, unidentified
  REGION 1..9: note = epitope involved in rheumatoid arthritis
PLTNRRLRG

SEQ ID NO: 2845 - protein, 15 aa, Homo sapiens
PPKGDKKGKKKDPNA

SEQ ID NO: 2846 - protein, 9 aa, unidentified
  REGION 1..9: note = epitope involved in rheumatoid arthritis
PPLLLTDVT

SEQ ID NO: 2847 - protein, 9 aa, unidentified
  REGION 1..9: note = epitope involved in rheumatoid arthritis
PQSPGSSFP

SEQ ID NO: 2848 - protein, 9 aa, unidentified
  REGION 1..9: note = epitope involved in rheumatoid arthritis
PSFPPALRL

SEQ ID NO: 2849 - protein, 9 aa, unidentified
  REGION 1..9: note = epitope involved in rheumatoid arthritis
PVSSTRGNM

SEQ ID NO: 2850 - protein, 9 aa, unidentified
  REGION 1..9: note = epitope involved in rheumatoid arthritis
PYPFAQKRL

SEQ ID NO: 2851 - protein, 9 aa, unidentified
  REGION 1..9: note = epitope involved in rheumatoid arthritis
QSPRLYPGS

SEQ ID NO: 2852 - protein, 9 aa, unidentified
  REGION 1..9: note = epitope involved in rheumatoid arthritis
RGGIRRQSL

SEQ ID NO: 2853 - protein, 9 aa, unidentified
  REGION 1..9: note = epitope involved in rheumatoid arthritis
RKALRLSAS

SEQ ID NO: 2854 - protein, 9 aa, unidentified
  REGION 1..9: note = epitope involved in rheumatoid arthritis
RPPHSASWR

SEQ ID NO: 2855 - protein, 9 aa, unidentified
  REGION 1..9: note = epitope involved in rheumatoid arthritis
RRGPEAHQA

SEQ ID NO: 2856 - protein, 9 aa, unidentified
  REGION 1..9: note = epitope involved in rheumatoid arthritis
RRRVRNSDT

SEQ ID NO: 2857 - protein, 15 aa, Homo sapiens
RYDREMKNYVPPKGD

SEQ ID NO: 2858 - protein, 9 aa, unidentified
  REGION 1..9: note = epitope involved in rheumatoid arthritis
SESTIQNLR

SEQ ID NO: 2859 - protein, 14 aa, Homo sapiens
SHQESTRGRSRGRS

SEQ ID NO: 2860 - protein, 19 aa, Homo sapiens
SHQESTRGRSRGRSGRSGS

SEQ ID NO: 2861 - protein, 19 aa, Homo sapiens
SHQESTRGRSRGRSGRSGS

SEQ ID NO: 2862 - protein, 19 aa, Homo sapiens
SHQESTRGRSRGRSGRSGS

SEQ ID NO: 2863 - protein, 19 aa, Homo sapiens
SHQESTRGRSRGRSGRSGS

SEQ ID NO: 2864 - protein, 19 aa, Homo sapiens
SHQESTRGRSRGRSGRSGS

SEQ ID NO: 2865 - protein, 19 aa, Homo sapiens
SHQESTRGRSRGRSGRSGS

SEQ ID NO: 2866 - protein, 19 aa, Homo sapiens
SHQESTRGRSRGRSGRSGS

SEQ ID NO: 2867 - protein, 19 aa, Homo sapiens
SHQESTRGRSRGRSGRSGS

SEQ ID NO: 2868 - protein, 9 aa, unidentified
  REGION 1..9: note = epitope involved in rheumatoid arthritis
STLVPNKAP

SEQ ID NO: 2869 - protein, 16 aa, Homo sapiens
STRSVSSSSYRRMFGG

SEQ ID NO: 2870 - protein, 9 aa, unidentified
  REGION 1..9: note = epitope involved in rheumatoid arthritis
TFRDLHQQQ

SEQ ID NO: 2871 - protein, 14 aa, Homo sapiens
TGPSTRGRQGSRHE

SEQ ID NO: 2872 - protein, 17 aa, Homo sapiens
TGPSTRGRQGSRHEQAQ

SEQ ID NO: 2873 - protein, 17 aa, Homo sapiens
TGPSTRGRQGSRHEQAQ

SEQ ID NO: 2874 - protein, 18 aa, Homo sapiens
TIHAHPGSRRGGRHGYHH

SEQ ID NO: 2875 - protein, 10 aa, unidentified
  REGION 1..10: note = epitope involved in rheumatoid arthritis
TLTFTLNKLR

SEQ ID NO: 2876 - protein, 9 aa, unidentified
  REGION 1..9: note = epitope involved in rheumatoid arthritis
TPDSLGRPS

SEQ ID NO: 2877 - protein, 17 aa, Homo sapiens
VDDTQFVRFDSDAASPR

SEQ ID NO: 2878 - protein, 21 aa, Homo sapiens
VDDTQFVRFDSDAASPRGEPR

SEQ ID NO: 2879 - protein, 9 aa, unidentified
  REGION 1..9: note = epitope involved in rheumatoid arthritis
VPVDAGTAK

SEQ ID NO: 2880 - protein, 9 aa, unidentified
  REGION 1..9: note = epitope involved in rheumatoid arthritis
YKLRRAYYA

SEQ ID NO: 2881 - protein, 9 aa, unidentified
  REGION 1..9: note = epitope involved in rheumatoid arthritis
YTLQKAVLS

SEQ ID NO: 2882 - protein, 11 aa, Rattus norvegicus
ARGLTGRPGDA

SEQ ID NO: 2883 - protein, 16 aa, Homo sapiens
CKPISGHNSLFWYRQT

SEQ ID NO: 2884 - protein, 16 aa, Homo sapiens
DAGVIQSPRHEVTEMG

SEQ ID NO: 2885 - protein, 7 aa, Homo sapiens
DELTKNQ

SEQ ID NO: 2886 - protein, 7 aa, Homo sapiens
DKSRWQE

SEQ ID NO: 2887 - protein, 10 aa, Homo sapiens
DPISGHVSLF

SEQ ID NO: 2888 - protein, 7 aa, Homo sapiens
DSDGSFF

SEQ ID NO: 2889 - protein, 10 aa, Homo sapiens
EALHNHYQKS

SEQ ID NO: 2890 - protein, 7 aa, Homo sapiens
EGNVFSC

SEQ ID NO: 2891 - protein, 7 aa, Homo sapiens
ENYKTTP

SEQ ID NO: 2892 - protein, 7 aa, Homo sapiens
EPQVYTL

SEQ ID NO: 2893 - protein, 7 aa, Homo sapiens
EWGSNDG

SEQ ID NO: 2894 - protein, 7 aa, Homo sapiens
FFLYSKL

SEQ ID NO: 2895 - protein, 7 aa, Homo sapiens
FLYSKLT

SEQ ID NO: 2896 - protein, 15 aa, Bos taurus
GERGSPGAVGPKGSP

SEQ ID NO: 2897 - protein, 7 aa, Homo sapiens
GLHNHYT

SEQ ID NO: 2898 - protein, 7 aa, Homo sapiens
GNVFSCS

SEQ ID NO: 2899 - protein, 15 aa, Bos taurus
GPTGARGPEGAQGPR

SEQ ID NO: 2900 - protein, 7 aa, Homo sapiens
GQPREPQ

SEQ ID NO: 2901 - protein, 15 aa, Bos taurus
GSAGAPGIAGAPGFP

SEQ ID NO: 2902 - protein, 7 aa, Homo sapiens
GSFFLYS

SEQ ID NO: 2903 - protein, 7 aa, Homo sapiens
HEGLHNH

SEQ ID NO: 2904 - protein, 8 aa, Rattus norvegicus
IAGFKGEQ

SEQ ID NO: 2905 - protein, 16 aa, Homo sapiens
KIQPSEPRDSAVYFCA

SEQ ID NO: 2906 - protein, 7 aa, Homo sapiens
KNQVSLT

SEQ ID NO: 2907 - protein, 10 aa, Homo sapiens
KPISGHNSLF

SEQ ID NO: 2908 - protein, 7 aa, Homo sapiens
KSRWQEG

SEQ ID NO: 2909 - protein, 7 aa, Homo sapiens
LDSDGSF

SEQ ID NO: 2910 - protein, 7 aa, Homo sapiens
LHNHYTQ

SEQ ID NO: 2911 - protein, 7 aa, Homo sapiens
LTKNQVS

SEQ ID NO: 2912 - protein, 11 aa, Homo sapiens
LVGPRGERGFP

SEQ ID NO: 2913 - protein, 7 aa, Homo sapiens
MHEGLHN

SEQ ID NO: 2914 - protein, 14 aa, Rattus norvegicus
MPGERGAAGIAGPK

SEQ ID NO: 2915 - protein, 7 aa, Homo sapiens
NQVSLTC

SEQ ID NO: 2916 - protein, 7 aa, Homo sapiens
NVFSCSV

SEQ ID NO: 2917 - protein, 7 aa, Homo sapiens
NYKTTPP

SEQ ID NO: 2918 - protein, 7 aa, Homo sapiens
PPSRDEL

SEQ ID NO: 2919 - protein, 7 aa, Homo sapiens
PPSREEM

SEQ ID NO: 2920 - protein, 7 aa, Homo sapiens
PSRDELT

SEQ ID NO: 2921 - protein, 7 aa, Homo sapiens
PSREEMT

SEQ ID NO: 2922 - protein, 7 aa, Homo sapiens
QKSLSLS

SEQ ID NO: 2923 - protein, 16 aa, Homo sapiens
QPLKEQPALNDSRYCL

SEQ ID NO: 2924 - protein, 7 aa, Homo sapiens
QPREPQV

SEQ ID NO: 2925 - protein, 7 aa, Homo sapiens
QVSLTCL

SEQ ID NO: 2926 - protein, 7 aa, Homo sapiens
QVYTLPP

SEQ ID NO: 2927 - protein, 7 aa, Homo sapiens
REPQVYT

SEQ ID NO: 2928 - protein, 21 aa, Mus musculus
RGFGFVTFSSMAEVDAAMAAR

SEQ ID NO: 2929 - protein, 11 aa, Homo sapiens
RSLDFQATTMF

SEQ ID NO: 2930 - protein, 7 aa, Homo sapiens
RWQEGNV

SEQ ID NO: 2931 - protein, 16 aa, Homo sapiens
SATFWQNPRNHFRCQV

SEQ ID NO: 2932 - protein, 7 aa, Homo sapiens
SCSVMHE

SEQ ID NO: 2933 - protein, 7 aa, Homo sapiens
SDGSFFL

SEQ ID NO: 2934 - protein, 7 aa, Homo sapiens
SFFLYSK

SEQ ID NO: 2935 - protein, 27 aa, Mus musculus
SGKPGAHVTVKKLFVGGIKEDTEEHHL

SEQ ID NO: 2936 - protein, 19 aa, Homo sapiens
SHQESTRGRSRGRSGRSGS

SEQ ID NO: 2937 - protein, 7 aa, Homo sapiens
SLSLSPG

SEQ ID NO: 2938 - protein, 7 aa, Homo sapiens
SLTCLVK

SEQ ID NO: 2939 - protein, 10 aa, Homo sapiens
SPRSGDLSVY

SEQ ID NO: 2940 - protein, 7 aa, Homo sapiens
SREEMTK

SEQ ID NO: 2941 - protein, 7 aa, Homo sapiens
SRWQEGN

SEQ ID NO: 2942 - protein, 16 aa, Homo sapiens
SRYCLSSRLRVSATFW

SEQ ID NO: 2943 - protein, 7 aa, Homo sapiens
SVMHEGL

SEQ ID NO: 2944 - protein, 7 aa, Homo sapiens
TKNQVSL

SEQ ID NO: 2945 - protein, 7 aa, Homo sapiens
TLPPSRE

SEQ ID NO: 2946 - protein, 7 aa, Homo sapiens
VEWGSND

SEQ ID NO: 2947 - protein, 7 aa, Homo sapiens
VFSCSVM

SEQ ID NO: 2948 - protein, 7 aa, Homo sapiens
VMHEGLH

SEQ ID NO: 2949 - protein, 7 aa, Homo sapiens
VSLTCLV

SEQ ID NO: 2950 - protein, 16 aa, Homo sapiens
VYFCASSFSTCSANYG

SEQ ID NO: 2951 - protein, 7 aa, Homo sapiens
VYTLPPS

SEQ ID NO: 2952 - protein, 7 aa, Homo sapiens
WQEGNVF

SEQ ID NO: 2953 - protein, 15 aa, Homo sapiens
GIAGAPGFPGPRGPP

SEQ ID NO: 2954 - protein, 15 aa, Homo sapiens
GIPGAKGSAGAPGIA

SEQ ID NO: 2955 - protein, 20 aa, Homo sapiens
ARGHRPLDKKREEAPSLRPA

SEQ ID NO: 2956 - protein, 20 aa, Homo sapiens
ARGHRPLDKKREEAPSLRPA

SEQ ID NO: 2957 - protein, 20 aa, Homo sapiens
ARGHRPLDKKREEAPSLRPA

SEQ ID NO: 2958 - protein, 20 aa, Homo sapiens
ARGHRPLDKKREEAPSLRPA

SEQ ID NO: 2959 - protein, 20 aa, Homo sapiens
ARGHRPLDKKREEAPSLRPA

SEQ ID NO: 2960 - protein, 20 aa, Homo sapiens
ARGHRPLDKKREEAPSLRPA

SEQ ID NO: 2961 - protein, 20 aa, Homo sapiens
ARGHRPLDKKREEAPSLRPA

SEQ ID NO: 2962 - protein, 20 aa, Homo sapiens
ARGHRPLDKKREEAPSLRPA

SEQ ID NO: 2963 - protein, 20 aa, Homo sapiens
ARGHRPLDKKREEAPSLRPA

SEQ ID NO: 2964 - protein, 20 aa, Homo sapiens
ARGHRPLDKKREEAPSLRPA

SEQ ID NO: 2965 - protein, 20 aa, Homo sapiens
ARGHRPLDKKREEAPSLRPA

SEQ ID NO: 2966 - protein, 20 aa, Homo sapiens
ARGHRPLDKKREEAPSLRPA

SEQ ID NO: 2967 - protein, 20 aa, Homo sapiens
ARGHRPLDKKREEAPSLRPA

SEQ ID NO: 2968 - protein, 20 aa, Homo sapiens
ARGHRPLDKKREEAPSLRPA

SEQ ID NO: 2969 - protein, 20 aa, Homo sapiens
ARGHRPLDKKREEAPSLRPA

SEQ ID NO: 2970 - protein, 20 aa, Homo sapiens
ARGHRPLDKKREEAPSLRPA

SEQ ID NO: 2971 - protein, 21 aa, unidentified
  REGION 1..21: note = epitope involved in rheumatoid arthritis
ARGHRPLDKKREEAPSLRPAD

SEQ ID NO: 2972 - protein, 38 aa, unidentified
  REGION 1..38: note = epitope involved in rheumatoid arthritis
ARGHRPLDKKREEAPSLRPAGGGHSTKRGHAKSRPVRG

SEQ ID NO: 2973 - protein, 18 aa, Homo sapiens
FFSARGHRPLDKKREEAP

SEQ ID NO: 2974 - protein, 18 aa, Homo sapiens
FFSARGHRPLDKKREEAP

SEQ ID NO: 2975 - protein, 18 aa, Homo sapiens
FFSARGHRPLDKKREEAP

SEQ ID NO: 2976 - protein, 18 aa, Homo sapiens
FFSARGHRPLDKKREEAP

SEQ ID NO: 2977 - protein, 18 aa, Homo sapiens
FFSARGHRPLDKKREEAP

SEQ ID NO: 2978 - protein, 18 aa, Homo sapiens
FFSARGHRPLDKKREEAP

SEQ ID NO: 2979 - protein, 18 aa, Homo sapiens
FFSARGHRPLDKKREEAP

SEQ ID NO: 2980 - protein, 18 aa, Homo sapiens
FFSARGHRPLDKKREEAP

SEQ ID NO: 2981 - protein, 24 aa, unidentified
  REGION 1..24: note = epitope involved in rheumatoid arthritis
GFFCARGHRPLDKKREEAPCLRPA

SEQ ID NO: 2982 - protein, 18 aa, Homo sapiens
GNVSPGTRREYHTEKLVT

SEQ ID NO: 2983 - protein, 18 aa, Homo sapiens
GNVSPGTRREYHTEKLVT

SEQ ID NO: 2984 - protein, 18 aa, Homo sapiens
GNVSPGTRREYHTEKLVT

SEQ ID NO: 2985 - protein, 21 aa, unidentified [sequence omitted]

SEQ ID NO: 2986 - protein, 15 aa, Homo sapiens
HSTKRGHAKSRPVRG

SEQ ID NO: 2987 - protein, 15 aa, Homo sapiens
HSTKRGHAKSRPVRG

SEQ ID NO: 2988 - protein, 15 aa, Homo sapiens
HSTKRGHAKSRPVRG

SEQ ID NO: 2989 - protein, 15 aa, Homo sapiens
HSTKRGHAKSRPVRG

SEQ ID NO: 2990 - protein, 15 aa, Homo sapiens
HSTKRGHAKSRPVRG

SEQ ID NO: 2991 - protein, 15 aa, Homo sapiens
HSTKRGHAKSRPVRG

SEQ ID NO: 2992 - protein, 15 aa, Homo sapiens
HSTKRGHAKSRPVRG

SEQ ID NO: 2993 - protein, 15 aa, Homo sapiens
HSTKRGHAKSRPVRG

SEQ ID NO: 2994 - protein, 36 aa, unidentified
  REGION 1..36: note = epitope involved in rheumatoid arthritis
HSTKRGHAKSRPVRGHQCHQESTRGRSRGRCGRSGS

SEQ ID NO: 2995 - protein, 18 aa, Homo sapiens
IAKDLLPSRDRQHLPLIK

SEQ ID NO: 2996 - protein, 18 aa, Homo sapiens
IAKDLLPSRDRQHLPLIK

SEQ ID NO: 2997 - protein, 18 aa, Homo sapiens
IAKDLLPSRDRQHLPLIK

SEQ ID NO: 2998 - protein, 18 aa, Homo sapiens
IAKDLLPSRDRQHLPLIK

SEQ ID NO: 2999 - protein, 22 aa, Mus musculus
QTLDHNTMYWYKQDSKKLLKIM

SEQ ID NO: 3000 - protein, 18 aa, Homo sapiens
RARPAKAAATQKKVERKA

SEQ ID NO: 3001 - protein, 18 aa, Homo sapiens
RARPAKAAATQKKVERKA

SEQ ID NO: 3002 - protein, 18 aa, Homo sapiens
RARPAKAAATQKKVERKA

SEQ ID NO: 3003 - protein, 18 aa, Homo sapiens
RARPAKAAATQKKVERKA

SEQ ID NO: 3004 - protein, 18 aa, Homo sapiens
RARPAKAAATQKKVERKA

SEQ ID NO: 3005 - protein, 18 aa, Homo sapiens
RARPAKAAATQKKVERKA

SEQ ID NO: 3006 - protein, 18 aa, Homo sapiens
SGIGTLDGFRHRHPDEAA

SEQ ID NO: 3007 - protein, 18 aa, Homo sapiens
SGIGTLDGFRHRHPDEAA

SEQ ID NO: 3008 - protein, 18 aa, Homo sapiens
SRALAREVDLKDYEDQQK

SEQ ID NO: 3009 - protein, 18 aa, Homo sapiens
SRALAREVDLKDYEDQQK

SEQ ID NO: 3010 - protein, 18 aa, Homo sapiens
SRALAREVDLKDYEDQQK

SEQ ID NO: 3011 - protein, 15 aa, Homo sapiens
GNPGTDGIPGAKGSA

SEQ ID NO: 3012 - protein, 15 aa, Homo sapiens
GPAGASGNPGTDGIP

SEQ ID NO: 3013 - protein, 15 aa, Homo sapiens
GPRGEPGTPGSPGPA

SEQ ID NO: 3014 - protein, 15 aa, Homo sapiens
GTPGSPGPAGASGNP

SEQ ID NO: 3015 - protein, 7 aa, Homo sapiens
AGEKVTM

SEQ ID NO: 3016 - protein, 7 aa, Homo sapiens
AHIWWND

SEQ ID NO: 3017 - protein, 7 aa, Homo sapiens
ARMRDGA

SEQ ID NO: 3018 - protein, 7 aa, Homo sapiens
ASTRESG

SEQ ID NO: 3019 - protein, 7 aa, Homo sapiens
AVYFCHQ

SEQ ID NO: 3020 - protein, 7 aa, Homo sapiens
AWFAYWG

SEQ ID NO: 3021 - protein, 7 aa, Homo sapiens
AYWGQGT

SEQ ID NO: 3022 - protein, 7 aa, Homo sapiens
CARMRDG

SEQ ID NO: 3023 - protein, 7 aa, Homo sapiens
CHQYLSS

SEQ ID NO: 3024 - protein, 7 aa, Homo sapiens
CSFSGFS

SEQ ID NO: 3025 - protein, 7 aa, Homo sapiens
DGAWFAY

SEQ ID NO: 3026 - protein, 7 aa, Homo sapiens
DHKNYLA

SEQ ID NO: 3027 - protein, 7 aa, Homo sapiens
DLAVYFC

SEQ ID NO: 3028 - protein, 7 aa, Homo sapiens
EDLAVYF

SEQ ID NO: 3029 - protein, 7 aa, Homo sapiens
ESGVPDR

SEQ ID NO: 3030 - protein, 7 aa, Homo sapiens
EWLAHIW

SEQ ID NO: 3031 - protein, 7 aa, Homo sapiens
FAYWGQG

SEQ ID NO: 3032 - protein, 7 aa, Homo sapiens
FCHQYLS

SEQ ID NO: 3033 - protein, 7 aa, Homo sapiens
FSGFSLT

SEQ ID NO: 3034 - protein, 7 aa, Homo sapiens
FSLTTYG

SEQ ID NO: 3035 - protein, 7 aa, Homo sapiens
FYNTVLK

SEQ ID NO: 3036 - protein, 7 aa, Homo sapiens
GAWFAYW

SEQ ID NO: 3037 - protein, 7 aa, Homo sapiens
GFSLTTY

SEQ ID NO: 3038 - protein, 7 aa, Homo sapiens
GIGVGWI

SEQ ID NO: 3039 - protein, 7 aa, Homo sapiens
GKGLEWL

SEQ ID NO: 3040 - protein, 7 aa, Homo sapiens
GLEWLAH

SEQ ID NO: 3041 - protein, 15 aa, Bos taurus
GPAGPAGTAGARGAP

SEQ ID NO: 3042 - protein, 7 aa, Homo sapiens
GQSPKLL

SEQ ID NO: 3043 - protein, 7 aa, Homo sapiens
GSGSGTD

SEQ ID NO: 3044 - protein, 7 aa, Homo sapiens
GSGTDFT

SEQ ID NO: 3045 - protein, 7 aa, Homo sapiens
GVGWIRQ

SEQ ID NO: 3046 - protein, 7 aa, Homo sapiens
GVPDRFT

SEQ ID NO: 3047 - protein, 7 aa, Homo sapiens
GWIRQRS

SEQ ID NO: 3048 - protein, 7 aa, Homo sapiens
HIWWNDN

SEQ ID NO: 3049 - protein, 7 aa, Homo sapiens
HQYLSSF

SEQ ID NO: 3050 - protein, 7 aa, Homo sapiens
IGVGWIR

SEQ ID NO: 3051 - protein, 7 aa, Homo sapiens
IRQRSGK

SEQ ID NO: 3052 - protein, 7 aa, Homo sapiens
IWWNDNK

SEQ ID NO: 3053 - protein, 7 aa, Homo sapiens
KGLEWLA

SEQ ID NO: 3054 - protein, 7 aa, Homo sapiens
KLLIYWA

SEQ ID NO: 3055 - protein, 7 aa, Homo sapiens
KNYLAWY

SEQ ID NO: 3056 - protein, 7 aa, Homo sapiens
KVTMTCK

SEQ ID NO: 3057 - protein, 7 aa, Homo sapiens
LAHIWWN

SEQ ID NO: 3058 - protein, 7 aa, Homo sapiens
LAVYFCH

SEQ ID NO: 3059 - protein, 7 aa, Homo sapiens
LEWLAHI

SEQ ID NO: 3060 - protein, 7 aa, Homo sapiens
LIYWAST

SEQ ID NO: 3061 - protein, 7 aa, Homo sapiens
LLIYWAS

SEQ ID NO: 3062 - protein, 7 aa, Homo sapiens
LTCSFSG

SEQ ID NO: 3063 - protein, 7 aa, Homo sapiens
LYSSDHK

SEQ ID NO: 3064 - protein, 7 aa, Homo sapiens
MRDGAWF

SEQ ID NO: 3065 - protein, 7 aa, Homo sapiens
NYLAWYQ

SEQ ID NO: 3066 - protein, 7 aa, Homo sapiens
PGQSPKL

SEQ ID NO: 3067 - protein, 7 aa, Homo sapiens
PKLLIYW

SEQ ID NO: 3068 - protein, 7 aa, Homo sapiens
QSPKLLI

SEQ ID NO: 3069 - protein, 7 aa, Homo sapiens
QSVLYSS

SEQ ID NO: 3070 - protein, 7 aa, Homo sapiens
QTEDLAV

SEQ ID NO: 3071 - protein, 7 aa, Homo sapiens
QYLSSFT

SEQ ID NO: 3072 - protein, 7 aa, Homo sapiens
RDGAWFA

SEQ ID NO: 3073 - protein, 7 aa, Homo sapiens
RESGVPD

SEQ ID NO: 3074 - protein, 7 aa, Homo sapiens
RMRDGAW

SEQ ID NO: 3075 - protein, 7 aa, Homo sapiens
SAGEKVT

SEQ ID NO: 3076 - protein, 7 aa, Homo sapiens
SDHKNYL

SEQ ID NO: 3077 - protein, 7 aa, Homo sapiens
SFSGFSL

SEQ ID NO: 3078 - protein, 7 aa, Homo sapiens
SGFSLTT

SEQ ID NO: 3079 - protein, 7 aa, Homo sapiens
SGSGTDF

SEQ ID NO: 3080 - protein, 7 aa, Homo sapiens
SGVPDRF

SEQ ID NO: 3081 - protein, 7 aa, Homo sapiens
SLTTYGI

SEQ ID NO: 3082 - protein, 7 aa, Homo sapiens
SPKLLIY

SEQ ID NO: 3083 - protein, 7 aa, Homo sapiens
SQSVLYS

SEQ ID NO: 3084 - protein, 7 aa, Homo sapiens
SSQSVLY

SEQ ID NO: 3085 - protein, 7 aa, Homo sapiens
STRESGV

SEQ ID NO: 3086 - protein, 7 aa, Homo sapiens
SVLYSSD

SEQ ID NO: 3087 - protein, 7 aa, Homo sapiens
TCSFSGF

SEQ ID NO: 3088 - protein, 7 aa, Homo sapiens
TEDLAVY

SEQ ID NO: 3089 - protein, 7 aa, Homo sapiens
TGSGSGT

SEQ ID NO: 3090 - protein, 7 aa, Homo sapiens
TMTCKSS

SEQ ID NO: 3091 - protein, 7 aa, Homo sapiens
TRESGVP

SEQ ID NO: 3092 - protein, 7 aa, Homo sapiens
TTYGIGV

SEQ ID NO: 3093 - protein, 7 aa, Homo sapiens
TYGIGVG

SEQ ID NO: 3094 - protein, 7 aa, Homo sapiens
TYYCARM

SEQ ID NO: 3095 - protein, 7 aa, Homo sapiens
VGWIRQR

SEQ ID NO: 3096 - protein, 7 aa, Homo sapiens
VLYSSDH

SEQ ID NO: 3097 - protein, 7 aa, Homo sapiens
VPDRFTG

SEQ ID NO: 3098 - protein, 7 aa, Homo sapiens
VTMTCKS

SEQ ID NO: 3099 - protein, 7 aa, Homo sapiens
VYFCHQY

SEQ ID NO: 3100 - protein, 7 aa, Homo sapiens
WASTRES

SEQ ID NO: 3101 - protein, 7 aa, Homo sapiens
WFAYWGQ

SEQ ID NO: 3102 - protein, 7 aa, Homo sapiens
WIRQRSG

SEQ ID NO: 3103 - protein, 7 aa, Homo sapiens
WLAHIWW

SEQ ID NO: 3104 - protein, 7 aa, Homo sapiens
WNDNKFY

SEQ ID NO: 3105 - protein, 7 aa, Homo sapiens
WWNDNKF

SEQ ID NO: 3106 - protein, 7 aa, Homo sapiens
YCARMRD

SEQ ID NO: 3107 - protein, 7 aa, Homo sapiens
YFCHQYL

SEQ ID NO: 3108 - protein, 7 aa, Homo sapiens
YGIGVGW

SEQ ID NO: 3109 - protein, 7 aa, Homo sapiens
YLAWYQQ

SEQ ID NO: 3110 - protein, 7 aa, Homo sapiens
YLSSFTF

SEQ ID NO: 3111 - protein, 7 aa, Homo sapiens
YSSDHKN

SEQ ID NO: 3112 - protein, 7 aa, Homo sapiens
YWASTRE

SEQ ID NO: 3113 - protein, 7 aa, Homo sapiens
YYCARMR

SEQ ID NO: 3114 - protein, 16 aa, Mycobacterium tuberculosis
AILTGGQVISEEGVGL

SEQ ID NO: 3115 - protein, 16 aa, Mycobacterium tuberculosis
DRRKAMLQDMAILTGG

SEQ ID NO: 3116 - protein, 16 aa, Mycobacterium tuberculosis
DVEGEALSTLVVNKIR

SEQ ID NO: 3117 - protein, 15 aa, Mycobacterium tuberculosis
EEGVGLTLENADLSL

SEQ ID NO: 3118 - protein, 11 aa, Mycobacterium tuberculosis
VVNKIRGTFKS

SEQ ID NO: 3119 - protein, 16 aa, Mycobacterium tuberculosis
VVNKIRGTFKSVAVKA

SEQ ID NO: 3120 - protein, 13 aa, Homo sapiens
QDFTNRINKLKNS

SEQ ID NO: 3121 - protein, 8 aa, Streptococcus pyogenes
LTSRPAHG

SEQ ID NO: 3122 - protein, 12 aa, Mus musculus
LYFCAARSNYQL

SEQ ID NO: 3123 - protein, 15 aa, Rattus norvegicus
ALSTLVLNRLKVGLQ

SEQ ID NO: 3124 - protein, 15 aa, Homo sapiens
AYVLLSEKKISSIQS

SEQ ID NO: 3125 - protein, 15 aa, Homo sapiens
GEALSTLVLNRLKVG

SEQ ID NO: 3126 - protein, 15 aa, Human alphaherpesvirus sp.
GEALSTLVVNKIRGT

SEQ ID NO: 3127 - protein, 15 aa, Homo sapiens
KCEFQDAYVLLSEKK

SEQ ID NO: 3128 - protein, 15 aa, Homo sapiens
VASLLTTAEVVVTEI

SEQ ID NO: 3129 - protein, 15 aa, Rattus norvegicus
KERYSTLYISNAQVE

SEQ ID NO: 3130 - protein, 15 aa, Homo sapiens
AVCRTSMCSIQSAPP

SEQ ID NO: 3131 - protein, 15 aa, Mus musculus
GEPGIAGFKGDQGPK

SEQ ID NO: 3132 - protein, 15 aa, Rattus norvegicus
GEPGIAGFKGEQGPK

SEQ ID NO: 3133 - protein, 8 aa, Rattus norvegicus
IAGFKGEQ

SEQ ID NO: 3134 - protein, 15 aa, Bos taurus
GEPGIAGFKGEQGPK

SEQ ID NO: 3135 - protein, 15 aa, Bos taurus
GEPGIAGFKGEQGPK

SEQ ID NO: 3136 - protein, 26 aa, Homo sapiens
AGAARDALQGFKITQNNAMKISFAKK

SEQ ID NO: 3137 - protein, 24 aa, Homo sapiens
EPAVYFKEQFLDGDGWTSRWIESK

SEQ ID NO: 3138 - protein, 23 aa, Homo sapiens
GRGRGRGRGRGRGRGRGRGGPRR

SEQ ID NO: 3139 - protein, 17 aa, Homo sapiens
KALSVETEKLLKYLEAV

SEQ ID NO: 3140 - protein, 24 aa, Homo sapiens
KMTLKNREPVQLETLSIRGNRIRY

SEQ ID NO: 3141 - protein, 15 aa, Homo sapiens
KPKAAKPKKAAAKKK

SEQ ID NO: 3142 - protein, 11 aa, Homo sapiens
MAVPETRPNHT

SEQ ID NO: 3143 - protein, 20 aa, Homo sapiens
MKLVRFLMKLSHETVTIELK

SEQ ID NO: 3144 - protein, 17 aa, Enterovirus A
MVTSTITEKLLKNLVKI

SEQ ID NO: 3145 - protein, 21 aa, Mus musculus
RIHMVYSKRSGKPRGYAFIEY

SEQ ID NO: 3146 - protein, 24 aa, Homo sapiens
SQFGQILDILVSRSLKMRGQAFVI

SEQ ID NO: 3147 - protein, 22 aa, Homo sapiens
TKYKQRNGWSHKDLLRLSHLKP

SEQ ID NO: 3148 - protein, 20 aa, Homo sapiens
TLHKAFKGSIFVVFDSIESA

SEQ ID NO: 3149 - protein, 37 aa, Homo sapiens
VEPKVKSKKREAVAGRGRGRGRGRGRGRGRGRGGPRR

SEQ ID NO: 3150 - protein, 15 aa, Homo sapiens
AARGRGRGMGRGNIF

SEQ ID NO: 3151 - protein, 22 aa, Homo sapiens
TKYKQRNGWSHKDLLRLSHLKP

SEQ ID NO: 3152 - protein, 22 aa, Homo sapiens
TKYKQRNGWSHKDLLRLSHLKP

SEQ ID NO: 3153 - protein, 25 aa, Homo sapiens
VAGRGRGRGRGRGRGRGRGRGGPRR

SEQ ID NO: 3154 - protein, 18 aa, Homo sapiens
RKGHFLLSSKSGFWTIWL

SEQ ID NO: 3155 - protein, 22 aa, Mus musculus
AGRGRGRGRGRGRGRGRGRGSL

SEQ ID NO: 3156 - protein, 16 aa, Homo sapiens
GKALCWVCAQSRKHRD

SEQ ID NO: 3157 - protein, 15 aa, Human alphaherpesvirus sp.
GKTCPKEIPKGSKNT

SEQ ID NO: 3158 - protein, 16 aa, Homo sapiens
GLKKMLRTCAVHITLD

SEQ ID NO: 3159 - protein, 49 aa, Mus musculus
PLFPAGRGRGRGRGRGRGRGRGRGRGRGRGRGRGRGRGRGRGRGSLIYI

SEQ ID NO: 3160 - protein, 9 aa, Mycobacterium bovis
KPLLIIAED

SEQ ID NO: 3161 - protein, 10 aa, Human alphaherpesvirus sp.
FWRFLWGSSQ

SEQ ID NO: 3162 - protein, 20 aa, unidentified
  REGION 1..20: note = epitope involved in rheumatoid arthritis
MSKTEWNASQLPRLGGKEDR

SEQ ID NO: 3163 - protein, 20 aa, unidentified
  REGION 1..20: note = epitope involved in rheumatoid arthritis
MSKTEWNASQSRFGWFENKE

SEQ ID NO: 3164 - protein, 11 aa, Human alphaherpesvirus sp.
TLQRFAWGSSN

SEQ ID NO: 3165 - protein, 50 aa, Homo sapiens
GYGKINKKRIALTDNALIARSLGKYGIICMEDLIHEIYTVGKRFKEANNF

SEQ ID NO: 3166 - protein, 19 aa, Homo sapiens
RMARMARKAGNFYVPAEPK

SEQ ID NO: 3167 - protein, 15 aa, Homo sapiens
AAVGTSAAPVPSDNH

SEQ ID NO: 3168 - protein, 15 aa, Proteus mirabilis
FAESRIRRETIAAED

SEQ ID NO: 3169 - protein, 15 aa, Homo sapiens
GSLDSLRREIEQMRR

SEQ ID NO: 3170 - protein, 15 aa, Proteus mirabilis
LGSSESRRALQDSQR

SEQ ID NO: 3171 - protein, 5 aa, Homo sapiens
LRREI

SEQ ID NO: 3172 - protein, 16 aa, Homo sapiens
SQKDLLEQRRAAVDTY

SEQ ID NO: 3173 - protein, 21 aa, Bos taurus
ARTKQTARKSTGGKAPRKQLA

SEQ ID NO: 3174 - protein, 15 aa, Homo sapiens
EGNRPTNSIVFTKLT

SEQ ID NO: 3175 - protein, 15 aa, Homo sapiens
FNGEKINYTEGRAVL

SEQ ID NO: 3176 - protein, 15 aa, Homo sapiens
KIFVQGIIWDINSFD

SEQ ID NO: 3177 - protein, 21 aa, Bos taurus
LAGNAARDNKKTRIIPRHLQL

SEQ ID NO: 3178 - protein, 15 aa, Homo sapiens
LGKQLAKKIEPELDG

SEQ ID NO: 3179 - protein, 15 aa, Homo sapiens
MRMLVDLAKSRGVEA

SEQ ID NO: 3180 - protein, 16 aa, Bos taurus
PATGGVKKPHRYRPGT

SEQ ID NO: 3181 - protein, 13 aa, Homo sapiens
VEIRAEGNSRFTY

SEQ ID NO: 3182 - protein, 10 aa, Homo sapiens
ASAARLTMMW

SEQ ID NO: 3183 - protein, 16 aa, Homo sapiens
LFKPPKYHPDVPYVKR

SEQ ID NO: 3184 - protein, 15 aa, Homo sapiens
LRKFKNISYFPGKLR

SEQ ID NO: 3185 - protein, 17 aa, Homo sapiens
SKLIKIFQDHPLQKTYN

SEQ ID NO: 3186 - protein, 15 aa, Proteus mirabilis
ASRETKELRQEERQP

SEQ ID NO: 3187 - protein, 15 aa, unidentified
  REGION 1..15: note = epitope involved in rheumatoid arthritis
NGSSESRRALQDSQR

SEQ ID NO: 3188 - protein, 16 aa, Rattus norvegicus
YYVFFEEQEDEIIGFG

SEQ ID NO: 3189 - protein, 15 aa, Human alphaherpesvirus sp.
QKRAAQRAAGPSVAS

SEQ ID NO: 3190 - protein, 15 aa, Lactococcus lactis
QKRAAYDQYGEAGAN

SEQ ID NO: 3191 - protein, 15 aa, Human alphaherpesvirus sp.
QKRAAYDRFGHAAFE

SEQ ID NO: 3192 - protein, 19 aa, Homo sapiens
LPNFSSLNLRETNLDSLPL

SEQ ID NO: 3193 - protein, 19 aa, Homo sapiens
LPNFSSLNLRETNLDSLPL

SEQ ID NO: 3194 - protein, 19 aa, Homo sapiens
SSRSYVTTSTRTYSLGSAL

SEQ ID NO: 3195 - protein, 7 aa, unidentified
  REGION 1..7: note = epitope involved in rheumatoid arthritis
ALPPPYM

SEQ ID NO: 3196 - protein, 7 aa, unidentified
  REGION 1..7: note = epitope involved in rheumatoid arthritis
ESMPALS

SEQ ID NO: 3197 - protein, 7 aa, unidentified
  REGION 1..7: note = epitope involved in rheumatoid arthritis
GTNTAQK

SEQ ID NO: 3198 - protein, 7 aa, unidentified
  REGION 1..7: note = epitope involved in rheumatoid arthritis
IPNSTHT

SEQ ID NO: 3199 - protein, 7 aa, unidentified
  REGION 1..7: note = epitope involved in rheumatoid arthritis
KWSFTPP

SEQ ID NO: 3200 - protein, 7 aa, unidentified
  REGION 1..7: note = epitope involved in rheumatoid arthritis
LHSDARD

SEQ ID NO: 3201 - protein, 7 aa, unidentified
  REGION 1..7: note = epitope involved in rheumatoid arthritis
LNTTLKV

SEQ ID NO: 3202 - protein, 7 aa, unidentified
  REGION 1..7: note = epitope involved in rheumatoid arthritis
LPYKLTQ

SEQ ID NO: 3203 - protein, 7 aa, unidentified
  REGION 1..7: note = epitope involved in rheumatoid arthritis
MVPELTE

SEQ ID NO: 3204 - protein, 7 aa, unidentified
  REGION 1..7: note = epitope involved in rheumatoid arthritis
PGPSTTS

SEQ ID NO: 3205 - protein, 16 aa, Homo sapiens
AAAGYDVEKNNSRIKL

SEQ ID NO: 3206 - protein, 16 aa, Homo sapiens
AAKPKTAKPKAAKPKK

SEQ ID NO: 3207 - protein, 16 aa, Homo sapiens
AGAAKRKASGPPVSEL

SEQ ID NO: 3208 - protein, 16 aa, Homo sapiens
AKKAGAAKAKKPAGAA

SEQ ID NO: 3209 - protein, 16 aa, Homo sapiens
APKSPAKAKAVKPKAA

SEQ ID NO: 3210 - protein, 16 aa, Homo sapiens
ATPKKSAKKTPKKAKK

SEQ ID NO: 3211 - protein, 16 aa, Homo sapiens
EKTPVKKKARKSAGAA

SEQ ID NO: 3212 - protein, 16 aa, Homo sapiens
IKLGLKSLVSKGTLVQ

SEQ ID NO: 3213 - protein, 15 aa, unidentified
  REGION 1..15: note = epitope involved in rheumatoid arthritis
IWYINCFACETHAML

SEQ ID NO: 3214 - protein, 15 aa, unidentified
  REGION 1..15: note = epitope involved in rheumatoid arthritis
IWYINCFVCETHAML

SEQ ID NO: 3215 - protein, 15 aa, unidentified
  REGION 1..15: note = epitope involved in rheumatoid arthritis
IWYISCFGCETHAML

SEQ ID NO: 3216 - protein, 15 aa, unidentified
  REGION 1..15: note = epitope involved in rheumatoid arthritis
IWYITCFGCETHAML

SEQ ID NO: 3217 - protein, 16 aa, Homo sapiens
KAKKPAAAAGAKKAKS

SEQ ID NO: 3218 - protein, 17 aa, Homo sapiens
KEIKKVATPKKASKPKK

SEQ ID NO: 3219 - protein, 16 aa, Homo sapiens
KLNKKAASGEAKPKAK

SEQ ID NO: 3220 - protein, 16 aa, Homo sapiens
KSPKKAKAAKPKKAPK

SEQ ID NO: 3221 - protein, 15 aa, Gallus gallus
KSRKASKAKKVKRSK

SEQ ID NO: 3222 - protein, 16 aa, Homo sapiens
LVQTKGTGASGSFKLN

SEQ ID NO: 3223 - protein, 16 aa, Homo sapiens
PAGAAKKPKKATGAAT

SEQ ID NO: 3224 - protein, 16 aa, Homo sapiens
RSGVSLAALKKALAAA

SEQ ID NO: 3225 - protein, 16 aa, Homo sapiens
SETAPAAPAAPAPAEK

SEQ ID NO: 3226 - protein, 16 aa, Gallus gallus
SKPRAKSGARKSPKKK

SEQ ID NO: 3227 - protein, 31 aa, Gallus gallus
TESLVLSPAPAKPKRVKASRRSASHPTYSEM

SEQ ID NO: 3228 - protein, 16 aa, Homo sapiens
VSELITKAVAASKERS

SEQ ID NO: 3229 - protein, 18 aa, Homo sapiens
CSAGWLADRSVRYPISKA

SEQ ID NO: 3230 - protein, 16 aa, Homo sapiens
IPCYFIDPMHPVTTAP

SEQ ID NO: 3231 - protein, 16 aa, Homo sapiens
KEKEVVLLVATEGRVR

SEQ ID NO: 3232 - protein, 18 aa, Homo sapiens
LADRSVRYPISKARPNCG

SEQ ID NO: 3233 - protein, 16 aa, Homo sapiens
LQKRSSRHPRRSRPST

SEQ ID NO: 3234 - protein, 18 aa, Homo sapiens
QAGMDMCSAGWLADRSVR

SEQ ID NO: 3235 - protein, 15 aa, Yersinia enterocolitica
QKQLGWQAGMDEART

SEQ ID NO: 3236 - protein, 16 aa, Homo sapiens
QPSPLRVLLGTSLTIP

SEQ ID NO: 3237 - protein, 16 aa, Homo sapiens
RVLLGTSLTIPCYFID

SEQ ID NO: 3238 - protein, 16 aa, Homo sapiens
RVNSAYQDKVSLPNYP

SEQ ID NO: 3239 - protein, 18 aa, Homo sapiens
TTGHVYLAWQAGMDMCSA

SEQ ID NO: 3240 - protein, 17 aa, Homo sapiens
VATEGRVRVNSAYQDKV

SEQ ID NO: 3241 - protein, 9 aa, unidentified
  REGION 1..9: note = epitope involved in rheumatoid arthritis
ASSLLASSP

SEQ ID NO: 3242 - protein, 9 aa, unidentified
  REGION 1..9: note = epitope involved in rheumatoid arthritis
IPFPTLFAP

SEQ ID NO: 3243 - protein, 9 aa, unidentified
  REGION 1..9: note = epitope involved in rheumatoid arthritis
PHESDATVR

SEQ ID NO: 3244 - protein, 9 aa, unidentified
  REGION 1..9: note = epitope involved in rheumatoid arthritis
PHNRQESPA

SEQ ID NO: 3245 - protein, 9 aa, unidentified
  REGION 1..9: note = epitope involved in rheumatoid arthritis
PPLKPVIDE

SEQ ID NO: 3246 - protein, 9 aa, unidentified
  REGION 1..9: note = epitope involved in rheumatoid arthritis
PSPSLSHPL

SEQ ID NO: 3247 - protein, 16 aa, Homo sapiens
KATLVCLISDFYPGAV

SEQ ID NO: 3248 - protein, 16 aa, Homo sapiens
SGLQAEDEADYYCSSY

SEQ ID NO: 3249 - protein, 16 aa, Homo sapiens
TGTSSDVGGYNYVSWY

SEQ ID NO: 3250 - protein, 8 aa, Homo sapiens
EVFISAPR

SEQ ID NO: 3251 - protein, 21 aa, Human alphaherpesvirus sp.
PPPPSSPTHDPPDSDPQIPPP

SEQ ID NO: 3252 - protein, 8 aa, Homo sapiens
PQIVPEPM

SEQ ID NO: 3253 - protein, 21 aa, Homo sapiens
PTRAPSGPRPPSRSQAQTPPR

SEQ ID NO: 3254 - protein, 12 aa, Homo sapiens
ATEGRVRVNSAY

SEQ ID NO: 3255 - protein, 6 aa, Homo sapiens
LTSRPA

SEQ ID NO: 3256 - protein, 20 aa, Homo sapiens
VVLLVATEGRVRVNSAYQDK

SEQ ID NO: 3257 - protein, 20 aa, Homo sapiens
VVLLVATEGRVRVNSAYQDK

SEQ ID NO: 3258 - protein, 18 aa, unidentified
  REGION 1..18: note = epitope involved in rheumatoid arthritis
GPPGARGLTGRPGDAGPP

SEQ ID NO: 3259 - protein, 18 aa, unidentified
  REGION 1..18: note = epitope involved in rheumatoid arthritis
GPPGARGLTGRPGDAGPP

SEQ ID NO: 3260 - protein, 37 aa, unidentified
  REGION 1..37: note = epitope involved in rheumatoid arthritis
GPPGPPGPPGPPGPPGARGLTGRPGDAGPPGPPGACA

SEQ ID NO: 3261 - protein, 206 aa, Homo sapiens
PSVFLFPPKPKDTLMISRTPEVTCVVVDVSQEDPQVQFNWYVDGVQVHNAKTKPREQQFNSTYRVVSVLTVLHQNWLDGKEYKCKVSNKGLPSSIEKTISKAKGQPREPQVYTLPPSQEEMTKNQVSLTCLVKGFYPSDIAVEWESNGQPENNYKTTPPVLDSDGSFFLYSRLTVDKSRWQEGNVFSCSVMHEALHNHYTQKSLSL

SEQ ID NO: 3262 - protein, 9 aa, Burkholderia fungorum
RAGTDEGFG

SEQ ID NO: 3263 - protein, 20 aa, Homo sapiens
AFFPNMVNMLVLGKHLGIPK

SEQ ID NO: 3264 - protein, 17 aa, Homo sapiens
AKYNQLLRIEEELGSKA

SEQ ID NO: 3265 - protein, 18 aa, Homo sapiens
ANGWGVMVSHRSGETEDT

SEQ ID NO: 3266 - protein, 20 aa, Homo sapiens
APDRKGFRLLLASPRSCYKL

SEQ ID NO: 3267 - protein, 20 aa, Homo sapiens
CLEEKVCSLLEPLGLQCTFI

SEQ ID NO: 3268 - protein, 18 aa, Homo sapiens
EKGVPLYRHIADLAGNSE

SEQ ID NO: 3269 - protein, 20 aa, Homo sapiens
EPLGLQCTFINDFFTYHIRH

SEQ ID NO: 3270 - protein, 13 aa, Homo sapiens
ETTEESLRNYYEQ

SEQ ID NO: 3271 - protein, 14 aa, Homo sapiens
FEEYGKIDTIEIIT

SEQ ID NO: 3272 - protein, 20 aa, Homo sapiens
FPGLITLTISLLDTSNLELP

SEQ ID NO: 3273 - protein, 20 aa, Homo sapiens
FQEQQNEGHGEALLFEGIKK

SEQ ID NO: 3274 - protein, 19 aa, Homo sapiens
FRSGKYDLDFKSPDDPSRY

SEQ ID NO: 3275 - protein, 12 aa, Homo sapiens
GARGLTGRPGDA

SEQ ID NO: 3276 - protein, 12 aa, Homo sapiens
GARGLTGRPGDA

SEQ ID NO: 3277 - protein, 19 aa, Homo sapiens
IQVVGDDLTVTNPKRIAKA

SEQ ID NO: 3278 - protein, 20 aa, Homo sapiens
KAASGSTGDQKVQISYYGPK

SEQ ID NO: 3279 - protein, 13 aa, Homo sapiens
KFAGRNFRNPLAK

SEQ ID NO: 3280 - protein, 17 aa, Homo sapiens
KIHAREIFDSRGNPTVE

SEQ ID NO: 3281 - protein, 17 aa, Homo sapiens
KIHAREIFDSRGNPTVE

SEQ ID NO: 3282 - protein, 17 aa, Homo sapiens
KIHAREIFDSRGNPTVE

SEQ ID NO: 3283 - protein, 17 aa, Homo sapiens
KIHAREIFDSRGNPTVE

SEQ ID NO: 3284 - protein, 17 aa, Porphyromonas gingivalis
KIIGREILDSRGNPTVE

SEQ ID NO: 3285 - protein, 20 aa, Homo sapiens
KSVTTLAMKAKCKLTICPEE

SEQ ID NO: 3286 - protein, 20 aa, Homo sapiens
LLDTSNLELPEAVVFQDSVV

SEQ ID NO: 3287 - protein, 20 aa, Homo sapiens
LVNCDRDNLESSAMDCEDDE

SEQ ID NO: 3288 - protein, 20 aa, Homo sapiens
NDFFTYHIRHGEVHCGTNVR

SEQ ID NO: 3289 - protein, 18 aa, Homo sapiens
NFREAMRIGAEVYHNLKN

SEQ ID NO: 3290 - protein, 18 aa, Homo sapiens
NPKRIAKAVNEKSCNCLL

SEQ ID NO: 3291 - protein, 20 aa, Homo sapiens
PFGPVINGRCCLEEKVCSLL

SEQ ID NO: 3292 - protein, 20 aa, Homo sapiens
PGGKHNMDFYVEALAFPDTD

SEQ ID NO: 3293 - protein, 17 aa, Homo sapiens
RDYFEEYGKIDTIEIIT

SEQ ID NO: 3294 - protein, 20 aa, Homo sapiens
SINASPGVVVDIAHSPPAKK

SEQ ID NO: 3295 - protein, 17 aa, Homo sapiens
VDLFTSKGLFRAAVPSG

SEQ ID NO: 3296 - protein, 20 aa, Homo sapiens
VEALAFPDTDFPGLITLTIS

SEQ ID NO: 3297 - protein, 20 aa, Homo sapiens
VLDSEDLQDMSLMTLSTKTP

SEQ ID NO: 3298 - protein, 20 aa, Homo sapiens
VRVFQATRGKLSSKCSVVLG

SEQ ID NO: 3299 - protein, 20 aa, Homo sapiens
WGPCGQGAILLVNCDRDNLE

SEQ ID NO: 3300 - protein, 21 aa, Homo sapiens
YEALELRDNDKTRYMGKGVSK

SEQ ID NO: 3301 - protein, 25 aa, Homo sapiens
ACLDVGAVIATPEQLFAAYEDGFEQ

SEQ ID NO: 3302 - protein, 24 aa, Homo sapiens
DFDRAQRACLQNSAIIATPEQLQA

SEQ ID NO: 3303 - protein, 25 aa, Homo sapiens
FAAYEDGFEQCDAGWLADQTVRYPI

SEQ ID NO: 3304 - protein, 25 aa, Mus musculus
FAAYEDGFEQCDAGWLSDQTVRYPI

SEQ ID NO: 3305 - protein, 25 aa, Homo sapiens
FDQCDYGWLSDASVRHPVTVARAQC

SEQ ID NO: 3306 - protein, 25 aa, Homo sapiens
GVRTLYRFENQTGFPPPDSRFDAYC

SEQ ID NO: 3307 - protein, 24 aa, Homo sapiens
HQCDAGWLADQTVRYPIHTPREGC

SEQ ID NO: 3308 - protein, 23 aa, Mus musculus
IASPEQLFAAYEDGFEQCDAGWL

SEQ ID NO: 3309 - protein, 23 aa, Mus musculus
IATPEQLQAAYEDGFHQCDAGWL

SEQ ID NO: 3310 - protein, 24 aa, Homo sapiens
IATPEQLQAAYEDGFHQCDAGWLA

SEQ ID NO: 3311 - protein, 24 aa, Homo sapiens
LADRSVRYPISKARPNCGGNLLGV

SEQ ID NO: 3312 - protein, 25 aa, Homo sapiens
LHKVKVGKSPPVRGSLSGKVSLPCH

SEQ ID NO: 3313 - protein, 24 aa, Homo sapiens
PIHTPREGCYGDKDEFPGVRTYGI

SEQ ID NO: 3314 - protein, 25 aa, Homo sapiens
PPDSRFDAYCFKRRMSDLSVIGHPI

SEQ ID NO: 3315 - protein, 25 aa, Mus musculus
QAAYEDGFHQCDAGWLADQTVRYPI

SEQ ID NO: 3316 - protein, 25 aa, Homo sapiens
RLATVGELQAAWRNGFDQCDYGWLS

SEQ ID NO: 3317 - protein, 24 aa, Homo sapiens
RVSKEKEVVLLVATEGRVRVNSAY

SEQ ID NO: 3318 - protein, 13 aa, Homo sapiens
SDLSVIGHPIDSE

SEQ ID NO: 3319 - protein, 24 aa, Homo sapiens
YLAWQAGMDMCSAGWLADRSVRYP

SEQ ID NO: 3320 - protein, 20 aa, Mus musculus
HQCHQESTGRSRGRCGRSGS

SEQ ID NO: 3321 - protein, 21 aa, Mus musculus
HQCHQESTKGKSKGKCGKSGS

SEQ ID NO: 3322 - protein, 21 aa, Mus musculus
HQCHQESTKGKSKGKCGKSGS

SEQ ID NO: 3323 - protein, 19 aa, Mus musculus
SHQESTKGKSKGKSGKSGS

SEQ ID NO: 3324 - protein, 19 aa, Mus musculus
SHQESTKGKSKGKSGKSGS

SEQ ID NO: 3325 - protein, 7 aa, Homo sapiens
CSVMHEA

SEQ ID NO: 3326 - protein, 7 aa, unidentified
  REGION 1..7: note = epitope involved in rheumatoid arthritis
FRVVSVL

SEQ ID NO: 3327 - protein, 7 aa, unidentified
  REGION 1..7: note = epitope involved in rheumatoid arthritis
HNAKTKL

SEQ ID NO: 3328 - protein, 7 aa, Homo sapiens
MHEALHN

SEQ ID NO: 3329 - protein, 7 aa, unidentified
  REGION 1..7: note = epitope involved in rheumatoid arthritis
PREQQFN

SEQ ID NO: 3330 - protein, 7 aa, unidentified
  REGION 1..7: note = epitope involved in rheumatoid arthritis
QQFNSTF

SEQ ID NO: 3331 - protein, 7 aa, Homo sapiens
SVMHEAL

SEQ ID NO: 3332 - protein, 7 aa, unidentified
  REGION 1..7: note = epitope involved in rheumatoid arthritis
TFRVVSV

SEQ ID NO: 3333 - protein, 7 aa, Homo sapiens
VLTVLHQ

SEQ ID NO: 3334 - protein, 7 aa, Homo sapiens
VMHEALH

SEQ ID NO: 3335 - protein, 15 aa, Homo sapiens
DKKREEAPSLRPAPP

SEQ ID NO: 3336 - protein, 15 aa, Homo sapiens
DSPGSGNARPNNPDW

SEQ ID NO: 3337 - protein, 14 aa, Homo sapiens
EQSADSSRHSGSGH

SEQ ID NO: 3338 - protein, 15 aa, Homo sapiens
ERGSAGHWTSESSVS

SEQ ID NO: 3339 - protein, 14 aa, Homo sapiens
ESSRDGSRHPRSHD

SEQ ID NO: 3340 - protein, 15 aa, Homo sapiens
GDKELRTGKEKVTSG

SEQ ID NO: 3341 - protein, 15 aa, Homo sapiens
GPRVVERHQSACKDS

SEQ ID NO: 3342 - protein, 15 aa, Homo sapiens
GTFEEVSGNVSPGTR

SEQ ID NO: 3343 - protein, 15 aa, Homo sapiens
IEVLKRKVIEKVQHI

SEQ ID NO: 3344 - protein, 15 aa, Homo sapiens
LENLRSKIQKLESDV

SEQ ID NO: 3345 - protein, 15 aa, Homo sapiens
LLQQERPIRNSVDEL

SEQ ID NO: 3346 - protein, 15 aa, Homo sapiens
MELERPGGNEITRGG

SEQ ID NO: 3347 - protein, 15 aa, Homo sapiens
NRCHAANPNGRYYWG

SEQ ID NO: 3348 - protein, 15 aa, Homo sapiens
PEWKALTDMPQMRME

SEQ ID NO: 3349 - protein, 15 aa, Homo sapiens
PRKQCSKEDGGGWWY

SEQ ID NO: 3350 - protein, 15 aa, Homo sapiens
QKLESDVSAQMEYCR

SEQ ID NO: 3351 - protein, 15 aa, Homo sapiens
QNPGSPRPGSTGTWN

SEQ ID NO: 3352 - protein, 15 aa, Homo sapiens
RGHAKSRPVRGIHTS

SEQ ID NO: 3353 - protein, 15 aa, Homo sapiens
RPAPPPISGGGYRAR

SEQ ID NO: 3354 - protein, 15 aa, Homo sapiens
SCSRALAREVDLKDY

SEQ ID NO: 3355 - protein, 15 aa, Homo sapiens
SGCRMKGLIDEVNQD

SEQ ID NO: 3356 - protein, 15 aa, Homo sapiens
SGIGTLDGFRHRHPD

SEQ ID NO: 3357 - protein, 15 aa, Homo sapiens
SRGSESGIFTNTKES

SEQ ID NO: 3358 - protein, 15 aa, Homo sapiens
SSHHPGIAEFPSRGK

SEQ ID NO: 3359 - protein, 15 aa, Homo sapiens
SYNRGDSTFESKSYK

SEQ ID NO: 3360 - protein, 14 aa, Homo sapiens [sequence omitted]

SEQ ID NO: 3361 - protein, 18 aa, Homo sapiens
TIHAHPGSRRGGRHGYHH

SEQ ID NO: 3362 - protein, 15 aa, Homo sapiens
TTRRSCSKTVTKTVI

SEQ ID NO: 3363 - protein, 15 aa, Homo sapiens
VDIDIKIRSCRGSCS

SEQ ID NO: 3364 - protein, 15 aa, Homo sapiens
VIQNRQDGSVDFGRK

SEQ ID NO: 3365 - protein, 15 aa, Homo sapiens
WYNRCHAANPNGRYY

SEQ ID NO: 3366 - protein, 15 aa, Homo sapiens
WYSMRKMSMKIRPFF

SEQ ID NO: 3367 - protein, 15 aa, Homo sapiens
GGGYRARPAKAAATQ

SEQ ID NO: 3368 - protein, 15 aa, Homo sapiens
GKLYGIRDVRSTRDR

SEQ ID NO: 3369 - protein, 15 aa, Homo sapiens
YAEYHFRVGSEAEGY

SEQ ID NO: 3370 - protein, 20 aa, Porphyromonas gingivalis
TLVVNRLRGSLKICAVKAPG

SEQ ID NO: 3371 - protein, 17 aa, Homo sapiens
KIHAREIFDSRGNPTVE

SEQ ID NO: 3372 - protein, 19 aa, Homo sapiens
ANKYQISVNKYRGTAGNAL

SEQ ID NO: 3373 - protein, 30 aa, Homo sapiens
KYQISVNKYRGTAGNALMDGASQLMGENRT

SEQ ID NO: 3374 - protein, 30 aa, Homo sapiens; identical to SEQ ID NO: 3373

SEQ ID NO: 3375 - protein, 18 aa, Homo sapiens
NKYRGTAGNALMDGASQL

SEQ ID NO: 3376 - protein, 18 aa, Homo sapiens
NKYRGTAGNALMDGASQL

SEQ ID NO: 3377 - protein, 10 aa, Homo sapiens
LVVYPWTQRF

SEQ ID NO: 3378 - protein, 18 aa, Homo sapiens
QVTQPTVGMNFKTPRGPV

SEQ ID NO: 3379 - protein, 16 aa, Homo sapiens
RLPIIDVAPLDVGAPD

SEQ ID NO: 3380 - protein, 16 aa, Homo sapiens
TQGKIVDLVKELDRDT

SEQ ID NO: 3381 - protein, 9 aa, Human alphaherpesvirus sp.
GQSRGQSRG

SEQ ID NO: 3382 - protein, 21 aa, Human alphaherpesvirus sp.
GQSRGQSRGRGRGRGRGRGKG

SEQ ID NO: 3383 - protein, 15 aa, Human alphaherpesvirus sp.
GRGRGRGRGRGGGRG

SEQ ID NO: 3384 - protein, 8 aa, Homo sapiens
DLLPSRDR

SEQ ID NO: 3385 - protein, 8 aa, Homo sapiens
DLLPSRDR

SEQ ID NO: 3386 - protein, 9 aa, Homo sapiens
DRQHLPLIK

SEQ ID NO: 3387 - protein, 24 aa, Homo sapiens
EEAPSLRPAPPPISGGGYRARPAK

SEQ ID NO: 3388 - protein, 24 aa, Homo sapiens
EEAPSLRPAPPPISGGGYRARPAK

SEQ ID NO: 3389 - protein, 17 aa, Homo sapiens
ESSSHHPGIAEFPSRGK

SEQ ID NO: 3390 - protein, 15 aa, Homo sapiens
KDLLPSRDRQHLPLI

SEQ ID NO: 3391 - protein, 15 aa, Homo sapiens
KDLLPSRDRQHLPLI

SEQ ID NO: 3392 - protein, 17 aa, Homo sapiens
KESSSHHPGIAEFPSRG

SEQ ID NO: 3393 - protein, 18 aa, Homo sapiens
KQFTSSTSYNRGDSTFES

SEQ ID NO: 3394 - protein, 21 aa, Homo sapiens
KQFTSSTSYNRGDSTFESKSY

SEQ ID NO: 3395 - protein, 25 aa, Homo sapiens
KREEAPSLRPAPPPISGGGYRARPA

SEQ ID NO: 3396 - protein, 18 aa, Homo sapiens
QFTSSTSYNRGDSTFESK

SEQ ID NO: 3397 - protein, 13 aa, Homo sapiens
TSSTSYNRGDSTF

SEQ ID NO: 3398 - protein, 16 aa, Homo sapiens
GVYATRSSAVRLRSSV

SEQ ID NO: 3399 - protein, 16 aa, Homo sapiens
MSTRSVSSSSYRRMFG

SEQ ID NO: 3400 - protein, 20 aa, Bos taurus
MSGRGKQGGKARAKAKTRSS

SEQ ID NO: 3401 - skipped

SEQ ID NO: 3402 - protein, 38 aa, Mus musculus
KGSITSVQAIYVPADDLTDPAPATTFAHLDATTVLSRA

SEQ ID NO: 3403 - protein, 16 aa, Mus musculus
KLVIIESDLERAEERA

SEQ ID NO: 3404 - protein, 26 aa, Mus musculus
KSLQDIIAILGMDELSEEDKLTVSRA

SEQ ID NO: 3405 - protein, 18 aa, Mus musculus
RIMNVIGEPIDERGPIKT

SEQ ID NO: 3406 - protein, 16 aa, Mus musculus
RSITTIIDTFHQYSRK

SEQ ID NO: 3407 - protein, 32 aa, Mus musculus
RTTGIVLDSGDGVTHNVPIYEGYALPHAIMRL

SEQ ID NO: 3408 - protein, 16 aa, Mycobacterium tuberculosis
GLEPGVVAEKVRNLSV

SEQ ID NO: 3409 - protein, 18 aa, Homo sapiens
AFRGQYCYELDEKAVRPG

SEQ ID NO: 3410 - protein, 16 aa, Homo sapiens
AGYALAQMGRLKGPLL

SEQ ID NO: 3411 - protein, 17 aa, Homo sapiens
AISDYVFNTASLVYHEE

SEQ ID NO: 3412 - protein, 17 aa, Homo sapiens
AKNSLYLQMNSLRAEDT

SEQ ID NO: 3413 - protein, 16 aa, Homo sapiens
ALATISTLEAVRGRPF

SEQ ID NO: 3414 - protein, 13 aa, Homo sapiens
ALTNGIYPHKLVF

SEQ ID NO: 3415 - protein, 17 aa, Homo sapiens
AMKAAMALEKKLNQALL

SEQ ID NO: 3416 - protein, 16 aa, Homo sapiens
ANGVIHMLDGILLPPT

SEQ ID NO: 3417 - protein, 15 aa, Homo sapiens
ANLELINTWVAKNTN

SEQ ID NO: 3418 - protein, 14 aa, Homo sapiens
APELLFFAKRYKAA

SEQ ID NO: 3419 - protein, 15 aa, Homo sapiens
APRLLIYDASNRATG

SEQ ID NO: 3420 - protein, 15 aa, Homo sapiens
APSAILPLPGQSVER

SEQ ID NO: 3421 - protein, 16 aa, Homo sapiens
APVELILSDETLPAPE

SEQ ID NO: 3422 - protein, 15 aa, Homo sapiens
ARTQLSWLKKQLAAA

SEQ ID NO: 3423 - protein, 14 aa, Homo sapiens
ASHFEQMAAASMHR

SEQ ID NO: 3424 - protein, 16 aa, Homo sapiens
AYPRISVNNVLPVFDN

SEQ ID NO: 3425 - protein, 24 aa, Homo sapiens
DDDGTGQKQIWRIEGSNKVPVDPA

SEQ ID NO: 3426 - protein, 19 aa, Homo sapiens
DDLKTDFYKDLTSLGHNEN

SEQ ID NO: 3427 - protein, 16 aa, Homo sapiens
DEPQYLDLPSTATSVN

SEQ ID NO: 3428 - protein, 14 aa, Homo sapiens
DFNVGGYIQAVLDR

SEQ ID NO: 3429 - protein, 16 aa, Homo sapiens
DGKRIQYQLVDISQDN

SEQ ID NO: 3430 - protein, 17 aa, Homo sapiens
DGVREVFEMATRAALQA

SEQ ID NO: 3431 - protein, 15 aa, Homo sapiens
DHPTFNKITPNLAEF

SEQ ID NO: 3432 - protein, 15 aa, Homo sapiens
DHVKLVNEVTEFAKT

SEQ ID NO: 3433 - protein, 14 aa, Homo sapiens
DIRPEIHENYRING

SEQ ID NO: 3434 - protein, 15 aa, Homo sapiens
DKVLIRIMVSRSEVD

SEQ ID NO: 3435 - protein, 17 aa, Homo sapiens
EEVKLIKKMGDHLTNLH

SEQ ID NO: 3436 - protein, 16 aa, Homo sapiens
EGARNIVAAMKAHGVD

SEQ ID NO: 3437 - protein, 12 aa, Homo sapiens
EIINWLDKNQTA

SEQ ID NO: 3438 - protein, 15 aa, Homo sapiens
ENIPFTLPEVSTNKT

SEQ ID NO: 3439 - protein, 19 aa, Homo sapiens
EPHRHSIFTPETNPRAGLE

SEQ ID NO: 3440 - protein, 18 aa, Homo sapiens
EQLGEYKFQNALLVRYTK

SEQ ID NO: 3441 - protein, 14 aa, Homo sapiens
ERNLVSWESQTQPQ

SEQ ID NO: 3442 - protein, 15 aa, Homo sapiens
ERTITMHKDSTGHVG

SEQ ID NO: 3443 - protein, 11 aa, Homo sapiens
ETFLKDLPIMF

SEQ ID NO: 3444 - protein, 13 aa, Homo sapiens
ETYGEMADCCAKQ

SEQ ID NO: 3445 - protein, 12 aa, Homo sapiens
EVENAVLGKDFK

SEQ ID NO: 3446 - protein, 22 aa, Homo sapiens
FEKSKEQLTPLIKKAGTELVNF

SEQ ID NO: 3447 - protein, 14 aa, Homo sapiens
FEPFFMMIATPAPH

SEQ ID NO: 3448 - protein, 21 aa, Homo sapiens
FLEQQNKILLAELEQLKGQGK

SEQ ID NO: 3449 - protein, 9 aa, Homo sapiens
FLLFPDMEA

SEQ ID NO: 3450 - protein, 16 aa, Homo sapiens
FPGFLENQKDPLAVDK

SEQ ID NO: 3451 - protein, 17 aa, Homo sapiens
FQNALLVRYTKKVPQVS

SEQ ID NO: 3452 - protein, 17 aa, Homo sapiens
FRGQYCYELDEKAVRPG

SEQ ID NO: 3453 - protein, 17 aa, Homo sapiens
FRGQYCYELDEKAVRPG

SEQ ID NO: 3454 - protein, 12 aa, Homo sapiens
FSISPNAVSAEE

SEQ ID NO: 3455 - protein, 12 aa, Homo sapiens
FSSEESNLGANN

SEQ ID NO: 3456 - protein, 10 aa, Homo sapiens
FVELGTQPAT

SEQ ID NO: 3457 - protein, 14 aa, Homo sapiens
GAYYLKLENQSLKS

SEQ ID NO: 3458 - protein, 17 aa, Homo sapiens
GDIQQFLITGDPKAAYD

SEQ ID NO: 3459 - protein, 18 aa, Homo sapiens
GETSEMYLIQPDSSVKPY

SEQ ID NO: 3460 - protein, 15 aa, Homo sapiens
GGGYVKLFPNSLDQT

SEQ ID NO: 3461 - protein, 18 aa, Homo sapiens
GGHAIRILGWGVENGTPY

SEQ ID NO: 3462 - protein, 16 aa, Homo sapiens
GGQFLRAVAQRCPSPP

SEQ ID NO: 3463 - protein, 17 aa, Homo sapiens
GHLSFGFMQDLQQKVVY

SEQ ID NO: 3464 - protein, 16 aa, Homo sapiens
GIKSLVSKGTLVQTKG

SEQ ID NO: 3465 - protein, 16 aa, Homo sapiens
GLKSLVSKGTLVQTKG

SEQ ID NO: 3466 - protein, 14 aa, Homo sapiens
GLLWIALHGNQITS

SEQ ID NO: 3467 - protein, 15 aa, Homo sapiens
GNQFWAIRGNEVRAG

SEQ ID NO: 3468 - protein, 12 aa, Homo sapiens
GNRIAQWQSFQL

SEQ ID NO: 3469 - protein, 22 aa, Homo sapiens
GPDPSSPAFRIEDANLIPPVPD

SEQ ID NO: 3470 - protein, 19 aa, Homo sapiens
GPGIPGRFTKEAGTLAYYE

SEQ ID NO: 3471 - protein, 15 aa, Homo sapiens
GPVKVWGSIKGLTEG

SEQ ID NO: 3472 - protein, 15 aa, Homo sapiens
GQYCYELDEKAVRPG

SEQ ID NO: 3473 - protein, 17 aa, Homo sapiens
GSAGHWTSESSVSGSTG

SEQ ID NO: 3474 - protein, 16 aa, Homo sapiens
GSHSLKYFHTSVSRPG

SEQ ID NO: 3475 - protein, 18 aa, Homo sapiens
GTDVPKWISIMTERSVPH

SEQ ID NO: 3476 - protein, 18 aa, Homo sapiens
GTGENYRGNVAVTVSGHT

SEQ ID NO: 3477 - protein, 19 aa, Homo sapiens
GVDEVTIVNILTNRSNAQR

SEQ ID NO: 3478 - protein, 12 aa, Homo sapiens
GVIKVFNDMKVR

SEQ ID NO: 3479 - protein, 13 aa, Homo sapiens
GYVRDETVRAAPY

SEQ ID NO: 3480 - protein, 18 aa, Homo sapiens
HLPDNINVYATTAANPRE

SEQ ID NO: 3481 - protein, 16 aa, Homo sapiens
HNGNLIPTHTQPSYRF

SEQ ID NO: 3482 - protein, 17 aa, Homo sapiens
IGGVILFHETLYQKADD

SEQ ID NO: 3483 - protein, 14 aa, Homo sapiens
IKIISKIENHEGVR

SEQ ID NO: 3484 - protein, 14 aa, Homo sapiens
ILEWAAERGPITSA

SEQ ID NO: 3485 - protein, 17 aa, Homo sapiens
IQSTYDQDHTVPAYVPR

SEQ ID NO: 3486 - protein, 12 aa, Homo sapiens
ISTPEELGLDKV

SEQ ID NO: 3487 - protein, 16 aa, Homo sapiens
IVHRYMTITSERSVPA

SEQ ID NO: 3488 - protein, 11 aa, Homo sapiens
IYVFHTLGQYF

SEQ ID NO: 3489 - protein, 15 aa, Homo sapiens
KIGRFVIEEVPGELM

SEQ ID NO: 3490 - protein, 24 aa, Homo sapiens
KKVPQVSTPTLVEVSRNLGKVGSK

SEQ ID NO: 3491 - protein, 14 aa, Homo sapiens
KPQYMVLVPSLLHT

SEQ ID NO: 3492 - protein, 16 aa, Homo sapiens
KTGKLVSLSAQNLVDC

SEQ ID NO: 3493 - protein, 14 aa, Homo sapiens
LAEFAFSLYRQLAH

SEQ ID NO: 3494 - protein, 14 aa, Homo sapiens
LAVVKSIRSIPAYL

SEQ ID NO: 3495 - protein, 15 aa, Homo sapiens
LDDPKYSSDEDLPSK

SEQ ID NO: 3496 - protein, 15 aa, Homo sapiens
LDFLKAVDTNRASVG

SEQ ID NO: 3497 - protein, 12 aa, Homo sapiens
LGEFVSETESRG

SEQ ID NO: 3498 - protein, 15 aa, Homo sapiens
LGQHLLPWMDRLSLE

SEQ ID NO: 3499 - protein, 15 aa, Homo sapiens
LINEYWVLTAAHVVE

SEQ ID NO: 3500 - protein, 17 aa, Homo sapiens
LKQEYFVVAATLQDIIR

SEQ ID NO: 3501 - protein, 17 aa, Homo sapiens
LKTGKLVSLSAQNLVDC

SEQ ID NO: 3502 - protein, 16 aa, Homo sapiens
LMHPDALEEPDDQNRI

SEQ ID NO: 3503 - protein, 16 aa, Homo sapiens
LNQELRADGTVNQIEG

SEQ ID NO: 3504 - protein, 18 aa, Homo sapiens
LPQPDLRYLFLNGNKLAR

SEQ ID NO: 3505 - protein, 17 aa, Homo sapiens
LRVLRAQPVQVAEGSEP

SEQ ID NO: 3506 - protein, 16 aa, Homo sapiens
LSKELQAAQARLGADM

SEQ ID NO: 3507 - protein, 14 aa, Homo sapiens
LVAYYTLIGASGQR

SEQ ID NO: 3508 - protein, 13 aa, Homo sapiens
MQQKLVDQNIFSF

SEQ ID NO: 3509 - protein, 13 aa, Homo sapiens
MVKVLDAVRGSPA

SEQ ID NO: 3510 - protein, 16 aa, Homo sapiens
NDVKNVIIWGNHSSTQ

SEQ ID NO: 3511 - protein, 16 aa, Homo sapiens
NEEEIRANVAVVSGAP

SEQ ID NO: 3512 - protein, 23 aa, Homo sapiens
NLDFLKAVDTNRASVGQDSPEPR

SEQ ID NO: 3513 - protein, 15 aa, Homo sapiens
NPAEFVVNTSNAGAG

SEQ ID NO: 3514 - protein, 15 aa, Homo sapiens
NPGTFRILVGNKGCS

SEQ ID NO: 3515 - protein, 18 aa, Homo sapiens
NPGTFRILVGNKGCSHPS

SEQ ID NO: 3516 - protein, 17 aa, Homo sapiens
NPLEIVSIPDNHGHIDP

SEQ ID NO: 3517 - protein, 15 aa, Homo sapiens
NSNQIKILGNQGSFL

SEQ ID NO: 3518 - protein, 16 aa, Homo sapiens
NVPTIDIHMNQIGFER

SEQ ID NO: 3519 - protein, 16 aa, Homo sapiens
QGGTYSKASTPNGYDN

SEQ ID NO: 3520 - protein, 16 aa, Homo sapiens
QPLGMISLMKRPPGFS

SEQ ID NO: 3521 - protein, 15 aa, Homo sapiens
QSGEYWIDPNQGSVE

SEQ ID NO: 3522 - protein, 25 aa, Homo sapiens
QSLPHENKPLTLSNYQTNKAKHDEL

SEQ ID NO: 3523 - protein, 19 aa, Homo sapiens
QTVAVGVIKAVDKKAAGAG

SEQ ID NO: 3524 - protein, 13 aa, Homo sapiens
RIEGSNKVPVDPA

SEQ ID NO: 3525 - protein, 16 aa, Homo sapiens
RLPGLAKQPSFRQYSG

SEQ ID NO: 3526 - protein, 16 aa, Homo sapiens
RPLLDKWPTTLSRHLG

SEQ ID NO: 3527 - protein, 16 aa, Homo sapiens
RPRAPIIAVTRNPQTA

SEQ ID NO: 3528 - protein, 15 aa, Homo sapiens
SARLTWDPTSRQING

SEQ ID NO: 3529 - protein, 16 aa, Homo sapiens
SDTSYVSLKAPLTKPL

SEQ ID NO: 3530 - protein, 15 aa, Homo sapiens
SDVDLIPMNDHNAYR

SEQ ID NO: 3531 - protein, 13 aa, Homo sapiens
SFYLSRDPDAQPG

SEQ ID NO: 3532 - protein, 16 aa, Homo sapiens
SGDVFTALIGEIASPN

SEQ ID NO: 3533 - protein, 18 aa, Homo sapiens
SGKPQYMVLVPSLLHTET

SEQ ID NO: 3534 - protein, 18 aa, Homo sapiens
SGLEVIDAMRSQLGKATA

SEQ ID NO: 3535 - protein, 17 aa, Homo sapiens
SKNTLYLQMNSLRAEDT

SEQ ID NO: 3536 - protein, 19 aa, Homo sapiens
SLRPKDYEVDATLKSLNNQ

SEQ ID NO: 3537 - protein, 17 aa, Homo sapiens
SPDRIFFHLNAVALGDG

SEQ ID NO: 3538 - protein, 18 aa, Homo sapiens
SPERPFLAILGGAKVADK

SEQ ID NO: 3539 - protein, 17 aa, Homo sapiens
SPLSVALALSHLALGAQ

SEQ ID NO: 3540 - protein, 14 aa, Homo sapiens
SPMYSIITPNILRL

SEQ ID NO: 3541 - protein, 19 aa, Homo sapiens
SPPISYIWYKQQTNNQEPI

SEQ ID NO: 3542 - protein, 19 aa, Homo sapiens
SPVTGYRVTTTPKNGPGPT

SEQ ID NO: 3543 - protein, 17 aa, Homo sapiens
SRLPIIDVAPLDVGAPD

SEQ ID NO: 3544 - protein, 16 aa, Homo sapiens
SYAGKYVPAIAHLIHS

SEQ ID NO: 3545 - protein, 15 aa, Homo sapiens
TAADYKILGGSVLHL

SEQ ID NO: 3546 - protein, 21 aa, Homo sapiens
TEEEFVEGIYKVEIDTKSYWK

SEQ ID NO: 3547 - protein, 18 aa, Homo sapiens
TGAQELLRVLRAQPVQVA

SEQ ID NO: 3548 - protein, 18 aa, Homo sapiens
TGDAYVILKTVQLRNGNL

SEQ ID NO: 3549 - protein, 14 aa, Homo sapiens
TGKLVSLSAQNLVD

SEQ ID NO: 3550 - protein, 15 aa, Homo sapiens
TGKLVSLSAQNLVDC

SEQ ID NO: 3551 - protein, 15 aa, Homo sapiens
TGNYRIESVLSSSGK

SEQ ID NO: 3552 - protein, 15 aa, Homo sapiens
THMLDVMQDHFSRAS

SEQ ID NO: 3553 - protein, 16 aa, Homo sapiens
TIYVIALKNNQKSEPL

SEQ ID NO: 3554 - protein, 16 aa, Homo sapiens
TLNQIDEVKVWPQQPS

SEQ ID NO: 3555 - protein, 16 aa, Homo sapiens
TLQSFRQDVDNASLAR

SEQ ID NO: 3556 - protein, 17 aa, Homo sapiens
TSATNIVKWITKQQNAQ

SEQ ID NO: 3557 - protein, 15 aa, Homo sapiens
TTAFQYIIDNKGIDS

SEQ ID NO: 3558 - protein, 19 aa, Homo sapiens
VAIQLNDTHPSLAIPELMR

SEQ ID NO: 3559 - protein, 21 aa, Homo sapiens
VDDTQFVRFDSDAASPRTEPR

SEQ ID NO: 3560 - protein, 18 aa, Homo sapiens
VDDTSIVVRWSRPQAPIT

SEQ ID NO: 3561 - protein, 17 aa, Homo sapiens
VDMDFEVENAVLGKDFK

SEQ ID NO: 3562 - protein, 15 aa, Homo sapiens
VFNILRMMPKGAALH

SEQ ID NO: 3563 - protein, 19 aa, Homo sapiens
VGPVDEVRELQKAIGAVPL

SEQ ID NO: 3564 - protein, 15 aa, Homo sapiens
VHPKVTVYPSKTQPL

SEQ ID NO: 3565 - protein, 15 aa, Homo sapiens
VPPEWKALTDMPQMR

SEQ ID NO: 3566 - protein, 16 aa, Homo sapiens
VPVPVFCDMTTEGGKW

SEQ ID NO: 3567 - protein, 17 aa, Homo sapiens
VPVPVFCDMTTEGGKWT

SEQ ID NO: 3568 - protein, 14 aa, Homo sapiens
VPYVIVPLKTGLQE

SEQ ID NO: 3569 - protein, 15 aa, Homo sapiens
VSGTLVLLQGARGFA

SEQ ID NO: 3570 - protein, 15 aa, Homo sapiens
VSQYFQTVTDYGKDL

SEQ ID NO: 3571 - protein, 15 aa, Homo sapiens
VSTAFVYTKNPNGYS

SEQ ID NO: 3572 - protein, 19 aa, Homo sapiens
VVLPSYEEALSLPSKTPEG

SEQ ID NO: 3573 - protein, 15 aa, Homo sapiens
VVYYRVQNATLAVAN

SEQ ID NO: 3574 - protein, 18 aa, Homo sapiens
YDGKDYIALKEDLRSWTA

SEQ ID NO: 3575 - protein, 19 aa, Homo sapiens
YDGSHRYVILKSEPVHPFG

SEQ ID NO: 3576 - protein, 26 aa, Homo sapiens
YDLRHTFMGVVSLGSPSGEVSHPRKT

SEQ ID NO: 3577 - protein, 12 aa, Homo sapiens
YLQMNSLRVEDT

SEQ ID NO: 3578 - protein, 12 aa, Homo sapiens
YLQMNSVRAEDT

SEQ ID NO: 3579 - protein, 11 aa, Homo sapiens
YVNGLTLGGQK

SEQ ID NO: 3580 - protein, 15 aa, Homo sapiens
CDMNTENGGWTVIQN

SEQ ID NO: 3581 - protein, 15 aa, Homo sapiens
DVSAQMEYCRTPCTV

SEQ ID NO: 3582 - protein, 15 aa, Homo sapiens
DWPFCSDEDWNYKCP

SEQ ID NO: 3583 - protein, 15 aa, Homo sapiens
EAVQSTSSSSQFYMY

SEQ ID NO: 3584 - protein, 15 aa, Homo sapiens
FTNRINKLKNSLFEY

SEQ ID NO: 3585 - protein, 15 aa, Homo sapiens
GDKELRTGKEKVTSG

SEQ ID NO: 3586 - protein, 12 aa, Mycobacterium tuberculosis
GLEPGVVAEKVR

SEQ ID NO: 3587 - protein, 15 aa, Homo sapiens
GSSERGSAGHWTSES

SEQ ID NO: 3588 - protein, 15 aa, Homo sapiens
IRVLRSILENLRSKI

SEQ ID NO: 3589 - protein, 15 aa, Homo sapiens
ITSDPRKQCSKEDGG

SEQ ID NO: 3590 - protein, 15 aa, Homo sapiens
LENLRSKIQKLESDV

SEQ ID NO: 3591 - protein, 11 aa, Mycobacterium tuberculosis
LEPGVVAEKVR

SEQ ID NO: 3592 - protein, 15 aa, Homo sapiens
LLQQERPIRNSVDEL

SEQ ID NO: 3593 - protein, 15 aa, Homo sapiens
LMGENRTMTIHNGMF

SEQ ID NO: 3594 - protein, 15 aa, Homo sapiens
NSNIPTNLRVLRSIL

SEQ ID NO: 3595 - protein, 15 aa, Homo sapiens
PRKQCSKEDGGGWWY

SEQ ID NO: 3596 - protein, 15 aa, Homo sapiens
QKLESDVSAQMEYCR

SEQ ID NO: 3597 - protein, 15 aa, Homo sapiens
QKQLEQVIAKDLLPS

SEQ ID NO: 3598 - protein, 15 aa, Homo sapiens
QMEYCRTPCTVSCNI

SEQ ID NO: 3599 - protein, 15 aa, Homo sapiens
QNPGSPRPGSTGTWN

SEQ ID NO: 3600 - protein, 15 aa, Homo sapiens
SETESRGSESGIFTN

SEQ ID NO: 3601 - protein, 15 aa, Homo sapiens
SGCRMKGLIDEVNQD

SEQ ID NO: 3602 - protein, 15 aa, Homo sapiens
SGPGSTGNRNPGSSG

SEQ ID NO: 3603 - protein, 15 aa, Homo sapiens
TPCTVSCNIPVVSGK

SEQ ID NO: 3604 - protein, 15 aa, Homo sapiens
TTRRSCSKTVTKTVI

SEQ ID NO: 3605 - protein, 15 aa, Homo sapiens
TVQNEANKYQISVNK

SEQ ID NO: 3606 - protein, 15 aa, Homo sapiens
VDIDIKIRSCRGSCS

SEQ ID NO: 3607 - protein, 15 aa, Homo sapiens
VDIDIKIRSCRGSCS

SEQ ID NO: 3608 - protein, 15 aa, Homo sapiens
VSPGTRREYHTEKLV

SEQ ID NO: 3609 - protein, 15 aa, Homo sapiens
VVWMNWKGSWYSMRK

SEQ ID NO: 3610 - protein, 15 aa, Homo sapiens
WYNRCHAANPNGRYY

SEQ ID NO: 3611 - protein, 15 aa, Homo sapiens
WYSMRKMSMKIRPFF

SEQ ID NO: 3612 - protein, 15 aa, Homo sapiens
YCGLPGEYWLGNDKI

SEQ ID NO: 3613 - protein, 17 aa, Homo sapiens
NEEGFFSARGHRPLDKK

SEQ ID NO: 3614 - protein, 15 aa, Homo sapiens
GPRVVERHQSACKDS

SEQ ID NO: 3615 - protein, 17 aa, Homo sapiens
KIHAREIFDSRGNPTVE

SEQ ID NO: 3616 - protein, 15 aa, Homo sapiens
VYATRSSAVRLRSSV

SEQ ID NO: 3617 - protein, 20 aa, Homo sapiens
GVYATRSSAVRLRSSVPGVR

SEQ ID NO: 3618 - protein, 20 aa, Homo sapiens
GVYATRSSAVRLRSSVPGVR

SEQ ID NO: 3619 - protein, 5 aa, Homo sapiens
GYRAR

SEQ ID NO: 3620 - protein, 4 aa, Homo sapiens
RVVE

SEQ ID NO: 3621 - protein, 15 aa, Homo sapiens
SGIGTLDGFRHRHPD

SEQ ID NO: 3622 - protein, 5 aa, Homo sapiens
VERHQ

SEQ ID NO: 3623 - protein, 20 aa, Homo sapiens
AAAIAYGLDKREGEKNILVF

SEQ ID NO: 3624 - protein, 20 aa, Homo sapiens
AGTIAGLNVMRIINEPTAAA

SEQ ID NO: 3625 - protein, 20 aa, Homo sapiens
AKFEELNMDLFRSTMKPVQK

SEQ ID NO: 3626 - protein, 20 aa, Homo sapiens
AKRALSSQHQARIEIESFYE

SEQ ID NO: 3627 - protein, 20 aa, Homo sapiens
AKRALSSQHQARIEIESFYE

SEQ ID NO: 3628 - protein, 20 aa, Homo sapiens
ATNGDTHLGGEDFDQRVMEH

SEQ ID NO: 3629 - protein, 20 aa, Homo sapiens
EDKKEDVGTVVGIDLGTTYS

SEQ ID NO: 3630 - protein, 21 aa, Homo sapiens
EDKKLKERIDTRNELESYAYS

SEQ ID NO: 3631 - protein, 20 aa, Homo sapiens
ESHQDADIEDFKAKKKELEE

SEQ ID NO: 3632 - protein, 20 aa, Homo sapiens
FAEEDKKLKERIDTRNELES

SEQ ID NO: 3633 - protein, 20 aa, Homo sapiens
GSAGPPPTGEEDTAELHHHH

SEQ ID NO: 3634 - protein, 20 aa, Homo sapiens
IDEIVLVGGSTRIPKIQQLV

SEQ ID NO: 3635 - protein, 20 aa, Homo sapiens
KDNRAVQKLRREVEKAKRAL

SEQ ID NO: 3636 - protein, 20 aa, Homo sapiens
KETMEKAVEEKIEWLESHQD

SEQ ID NO: 3637 - protein, 16 aa, Homo sapiens
KIHAREIFDSRGNPTV

SEQ ID NO: 3638 - protein, 20 aa, Homo sapiens
KLRREVEKAKRALSSQHQAR

SEQ ID NO: 3639 - protein, 20 aa, Homo sapiens
KTGKDVRKDNRAVQKLRREV

SEQ ID NO: 3640 - protein, 20 aa, Homo sapiens
KTGKDVRKDNRAVQKLRREV

SEQ ID NO: 3641 - protein, 20 aa, Homo sapiens
LYKKKTGKDVRKDNRAVQKL

SEQ ID NO: 3642 - protein, 20 aa, Homo sapiens
NKITITNDQNRLTPEEIERM

SEQ ID NO: 3643 - protein, 20 aa, Homo sapiens
NPENTVFDAKRLIGRTWNDP

SEQ ID NO: 3644 - protein, 20 aa, Homo sapiens
QNRLTPEEIERMVNDAEKFA

SEQ ID NO: 3645 - protein, 20 aa, Homo sapiens
RKDNRAVQKLRREVEKAKRA

SEQ ID NO: 3646 - protein, 20 aa, Homo sapiens
RKDNRAVQKLRREVEKAKRA

SEQ ID NO: 3647 - protein, 20 aa, Homo sapiens
SYVAFTPEGERLIGDAAKNQ

SEQ ID NO: 3648 - protein, 20 aa, Homo sapiens
TFEIDVNGILRVTAEDKGTG

SEQ ID NO: 3649 - protein, 20 aa, Homo sapiens
TFEIDVNGILRVTAEDKGTG

SEQ ID NO: 3650 - protein, 20 aa, Homo sapiens
TVGGVMTKLIPRNTVVPTKK

SEQ ID NO: 3651 - protein, 20 aa, Homo sapiens
TVPAYFNDAQRQATKDAGTI

SEQ ID NO: 3652 - protein, 20 aa, Homo sapiens
TVTIKVYEGERPLTKDNHLL

SEQ ID NO: 3653 - protein, 20 aa, Homo sapiens
VEIIANDQGNRITPSYVAFT

SEQ ID NO: 3654 - protein, 20 aa, Homo sapiens
VKEFFNGKEPSRGINPDEAV

SEQ ID NO: 3655 - protein, 20 aa, Homo sapiens
YEGEDFSETLTRAKFEELNM

SEQ ID NO: 3656 - protein, 327 aa, Homo sapiens
ASTKGPSVFPLAPCSRSTSESTAALGCLVKDYFPEPVTVSWNSGALTSGVHTFPAVLQSSGLYSLSSVVTVPSSSLGTKTYTCNVDHKPSNTKVDKRVESKYGPPCPSCPAPEFLGGPSVFLFPPKPKDTLMISRTPEVTCVVVDVSQEDPEVQFNWYVDGVEVHNAKTKPREEQFNSTYRVVSVLTVLHQDWLNGKEYKCKVSNKGLPSSIEKTISKAKGQPREPQVYTLPPSQEEMTKNQVSLTCLVKGFYPSDIAVEWESNGQPENNYKTTPPVLDSDGSFFLYSRLTVDKSRWQEGNVFSCSVMHEALHNHYTQKSLSLSLGK

SEQ ID NO: 3657 - protein, 15 aa, Rattus norvegicus
GIAGFKGEQGPKGET

SEQ ID NO: 3658 - protein, 15 aa, Rattus norvegicus
GIAGFKGEQGPKGET

SEQ ID NO: 3659 - protein, 15 aa, Rattus norvegicus
GIAGFKGEQGPKGET

SEQ ID NO: 3660 - protein, 15 aa, unidentified
  REGION 1..15: note = epitope involved in rheumatoid arthritis
GIAGNKGDQGPKGEB

SEQ ID NO: 3661 - protein, 20 aa, Mycobacterium tuberculosis
TLVVNKIRGTFKSVAVKAPG

SEQ ID NO: 3662 - protein, 20 aa, Human alphaherpesvirus sp.
TLVVNKLQGLLQVTVVTIPQ

SEQ ID NO: 3663 - protein, 14 aa, Homo sapiens
LTVGLTRRGQPRQY

SEQ ID NO: 3664 - protein, 14 aa, Homo sapiens
LTVGLTRRGQPRQY

SEQ ID NO: 3665 - protein, 13 aa, Homo sapiens
YNQYSQRYHQRTN

SEQ ID NO: 3666 - protein, 13 aa, Homo sapiens
APAPTARNKLTSE

SEQ ID NO: 3667 - protein, 21 aa, Homo sapiens
DAPRAVFPSIVGRPRHQGVMV

SEQ ID NO: 3668 - protein, 12 aa, Homo sapiens
EAQSKRGILTLK

SEQ ID NO: 3669 - protein, 11 aa, Homo sapiens
ERLGPLVEQGR

SEQ ID NO: 3670 - protein, 10 aa, Homo sapiens
GPSIVHRKCF

SEQ ID NO: 3671 - protein, 16 aa, Homo sapiens
IWHHTFYNELRVAPEE

SEQ ID NO: 3672 - protein, 15 aa, Homo sapiens
KLTSEARGRIPVAQK

SEQ ID NO: 3673 - protein, 20 aa, Homo sapiens
LAVYQAGAREGAERGLSAIR

SEQ ID NO: 3674 - protein, 14 aa, Homo sapiens
LDLAGRDLTDYLMK

SEQ ID NO: 3675 - protein, 27 aa, Homo sapiens
MKILTERGYSFTTTAEREIVRDIKEKL

SEQ ID NO: 3676 - protein, 11 aa, Homo sapiens
PGIADRMQKEI

SEQ ID NO: 3677 - protein, 13 aa, Homo sapiens
RQVDARRNVPQND

SEQ ID NO: 3678 - protein, 13 aa, Homo sapiens
QYMRADQAAGGLR

SEQ ID NO: 3679 - protein, 13 aa, Homo sapiens
SAVRARSSVPGVR

SEQ ID NO: 3680 - protein, 19 aa, Homo sapiens
ALMRGKSTEEARKELQAAG

SEQ ID NO: 3681 - protein, 19 aa, Homo sapiens
AMLPYDQYLHRFAAYFQQG

SEQ ID NO: 3682 - protein, 19 aa, Homo sapiens
ASTNGLINFIKQQREARVQ

SEQ ID NO: 3683 - protein, 19 aa, Homo sapiens
DLAKSRGVEAARERMFNGE

SEQ ID NO: 3684 - protein, 19 aa, Homo sapiens
EDLERLLPHKVFEGNRPTN

SEQ ID NO: 3685 - protein, 19 aa, Homo sapiens
FEFWDWVGGRYSLWSAIGL

SEQ ID NO: 3686 - protein, 19 aa, Homo sapiens
KLQQWYREHRSELNLRRLF

SEQ ID NO: 3687 - protein, 19 aa, Homo sapiens
NYTEGRAVLHVALRNRSNT

SEQ ID NO: 3688 - protein, 19 aa, Homo sapiens
SFCQRVRSGDWKGYTGKTI

SEQ ID NO: 3689 - protein, 16 aa, Homo sapiens
VYATRSSAVRLRSSVP

SEQ ID NO: 3690 - protein, 17 aa, Homo sapiens
NEEGFFSARGHRPLDKK

SEQ ID NO: 3691 - protein, 19 aa, Homo sapiens
SHQESTRGRSRGRSGRSGS

SEQ ID NO: 3692 - protein, 5 aa, Homo sapiens
TRGRS

SEQ ID NO: 3693 - protein, 36 aa, unidentified
  REGION 1..36: note = epitope involved in rheumatoid arthritis
HSTKRGHAKSRPVRGHQSHQESTRGRSRGRSGRSGS

SEQ ID NO: 3694 - protein, 15 aa, Human alphaherpesvirus sp.
AEEEEDDDMGFGLFD

SEQ ID NO: 3695 - protein, 32 aa, Human alphaherpesvirus sp.
ASAPTAAAAASGGAAAPAAAAEEEEDDDMGFG

SEQ ID NO: 3696 - protein, 35 aa, Human alphaherpesvirus sp.
ASAPTAAAAASGGAAAPAAAAEEEEDDDMGFGLFD

SEQ ID NO: 3697 - protein, 18 aa, Homo sapiens
CAPESIEFPVSEARVLED

SEQ ID NO: 3698 - protein, 10 aa, Homo sapiens
DDDMGFGLFD

SEQ ID NO: 3699 - protein, 16 aa, Mycobacterium tuberculosis
DLSLLGKARKVVVTKD

SEQ ID NO: 3700 - protein, 13 aa, Human alphaherpesvirus sp.
EEEDDDMGFGLFD

SEQ ID NO: 3701 - protein, 13 aa, Homo sapiens
EESDDDMGFGLFD

SEQ ID NO: 3702 - protein, 17 aa, Homo sapiens
ENPVVHFFKNIVTPRTP

SEQ ID NO: 3703 - protein, 5 aa, Homo sapiens
ERKRR

SEQ ID NO: 3704 - protein, 12 aa, Mus musculus
FYNQKFKGKATL

SEQ ID NO: 3705 - protein, 15 aa, Human alphaherpesvirus sp.
GDDGDDGDEGGDGDE

SEQ ID NO: 3706 - protein, 24 aa, Human alphaherpesvirus sp.
GGDNHGRGRGRGRGRGGGRPGAPG

SEQ ID NO: 3707 - protein, 9 aa, Human alphaherpesvirus sp.
GLCTLVAML

SEQ ID NO: 3708 - protein, 18 aa, Homo sapiens
GPSQQVMTPQGRGTVAAA

SEQ ID NO: 3709 - protein, 10 aa, Homo sapiens
HLKAVKMTLK

SEQ ID NO: 3710 - protein, 9 aa, Homo sapiens
ILQDGRIFI

SEQ ID NO: 3711 - protein, 22 aa, Human alphaherpesvirus sp.
KKEEKKEESEEEDEDMGFGLFD

SEQ ID NO: 3712 - protein, 24 aa, Mus musculus
KRHRKVLRDNIQGITKPAIRRLAR

SEQ ID NO: 3713 - protein, 17 aa, Homo sapiens
KRVLGLVLLRGENLVSM

SEQ ID NO: 3714 - protein, 7 aa, Human alphaherpesvirus sp.
MGFGLFD

SEQ ID NO: 3715 - protein, 20 aa, Homo sapiens
PTRAETREERMERKRREKIE

SEQ ID NO: 3716 - protein, 16 aa, Homo sapiens
QPHDLGKVGEVIVTKD

SEQ ID NO: 3717 - protein, 9 aa, Homo sapiens
SIRGNNIRY

SEQ ID NO: 3718 - protein, 24 aa, Mus musculus
TYTEHAKRKTVTAMDVVYALKRQG

SEQ ID NO: 3719 - protein, 13 aa, Human alphaherpesvirus sp.
RGQGDGGRRKKGG

SEQ ID NO: 3720 - protein, 21 aa, Mus musculus
AAMAARPHSIDGRVVEPKRAV

SEQ ID NO: 3721 - protein, 22 aa, Mus musculus
AEVRKALSRQEMQEVQSSRSGR

SEQ ID NO: 3722 - protein, 16 aa, Homo sapiens
CKPISGHNSLFWYRQT

SEQ ID NO: 3723 - protein, 16 aa, Homo sapiens
DAGVIQSPRHEVTEMG

SEQ ID NO: 3724 - protein, 21 aa, Mus musculus
DKIVLQKYHTINGHNAEVRKA

SEQ ID NO: 3725 - protein, 10 aa, Homo sapiens
DPISGHVSLF

SEQ ID NO: 3726 - protein, 16 aa, Homo sapiens
KIQPSEPRDSAVYFCA

SEQ ID NO: 3727 - protein, 10 aa, Homo sapiens
KPISGHNSLF

SEQ ID NO: 3728 - protein, 21 aa, Mus musculus
LTDCVVMRDPASKRSRGFGFV

SEQ ID NO: 3729 - protein, 21 aa, Mus musculus
MEREKEQFRKLFIGGLSFETT

SEQ ID NO: 3730 - protein, 16 aa, Homo sapiens
QPLKEQPALNDSRYCL

SEQ ID NO: 3731 - protein, 21 aa, Mus musculus
RGFGFVTFSSMAEVDAAMAAR

SEQ ID NO: 3732 - protein, 11 aa, Homo sapiens
RSLDFQATTMF

SEQ ID NO: 3733 - protein, 27 aa, Mus musculus
SGKPGAHVTVKKLFVGGIKEDTEEHHL

SEQ ID NO: 3734 - protein, 10 aa, Homo sapiens
SPRSGDLSVY

SEQ ID NO: 3735 - protein, 25 aa, Homo sapiens
AQGTLSKIFKLGGRDSRSGSPMARR

SEQ ID NO: 3736 - protein, 19 aa, Mus musculus
LSRFSWGAEGQKPGFGYGG

SEQ ID NO: 3737 - protein, 21 aa, Mus musculus
MEVGWYRSPFSRVVHLYRNGK

SEQ ID NO: 3738 - protein, 18 aa, Homo sapiens
KEQFLDGDGWTSRWIESK

SEQ ID NO: 3739 - protein, 21 aa, Homo sapiens
RIHMVYSKRSGKPRGYAFIEY

SEQ ID NO: 3740 - protein, 10 aa, Homo sapiens
YTCPLCRAPV

SEQ ID NO: 3741 - protein, 10 aa, Homo sapiens
DWEYSVWLSN

SEQ ID NO: 3742 - protein, 19 aa, Homo sapiens
GYYWSWIRQPPGKGEEWIG

SEQ ID NO: 3743 - protein, 9 aa, Homo sapiens
KGEQGEPGA

SEQ ID NO: 3744 - protein, 18 aa, Homo sapiens
VTWEVLEGEVEKEALKKI

SEQ ID NO: 3745 - protein, 26 aa, Homo sapiens
AGAARDALQGFKITQNNAMKISFAKK

SEQ ID NO: 3746 - protein, 20 aa, Homo sapiens
ANNGNLQLRNKEVTWEVLEG

SEQ ID NO: 3747 - protein, 21 aa, Homo sapiens
DGYVWQVTDMNRLHRFLCFGS

SEQ ID NO: 3748 - protein, 15 aa, Bos taurus
DVVYALKRQGRTLYG

SEQ ID NO: 3749 - protein, 18 aa, Bos taurus
DVVYALKRQGRTLYGFGG

SEQ ID NO: 3750 - protein, 13 aa, Human alphaherpesvirus sp.
EEEDEDMGFGLFD

SEQ ID NO: 3751 - protein, 22 aa, Homo sapiens
ELYKEKALSVETEKLLKYLEAV

SEQ ID NO: 3752 - protein, 24 aa, Homo sapiens
EPAVYFKEQFLDGDGWTSRWIESK

SEQ ID NO: 3753 - protein, 15 aa, Bos taurus
GITKPAIRRLARRGG

SEQ ID NO: 3754 - protein, 23 aa, Homo sapiens
GRGRGRGRGRGRGRGRGRGGPRR

SEQ ID NO: 3755 - protein, 16 aa, Homo sapiens
GSGKGKVQFQGKKTKF

SEQ ID NO: 3756 - protein, 17 aa, Homo sapiens
KALSVETEKLLKYLEAV

SEQ ID NO: 3757 - protein, 24 aa, Homo sapiens
KLIVCGMTSNGFTIADPDDRGMLD

SEQ ID NO: 3758 - protein, 24 aa, Homo sapiens
KMTLKNREPVQLETLSIRGNRIRY

SEQ ID NO: 3759 - protein, 15 aa, Homo sapiens
KPKAAKPKKAAAKKK

SEQ ID NO: 3760 - protein, 11 aa, Homo sapiens
MAVPETRPNHT

SEQ ID NO: 3761 - protein, 23 aa, Homo sapiens
MEESVNQMQPLNEKQIANSQDGY

SEQ ID NO: 3762 - protein, 20 aa, Homo sapiens
MKLVRFLMKLSHETVTIELK

SEQ ID NO: 3763 - protein, 17 aa, Enterovirus A
MVTSTITEKLLKNLVKI

SEQ ID NO: 3764 - protein, 10 aa, Homo sapiens
NGWSHKDLLR

SEQ ID NO: 3765 - protein, 7 aa, Homo sapiens
PPGMRPP

SEQ ID NO: 3766 - protein, 21 aa, Mus musculus
PTRAETREERMERKRREKIER

SEQ ID NO: 3767 - protein, 11 aa, Homo sapiens
PTRAPSGPRPP

SEQ ID NO: 3768 - protein, 21 aa, Mus musculus
RIHMVYSKRSGKPRGYAFIEY

SEQ ID NO: 3769 - protein, 21 aa, Mus musculus
RIHMVYSKRSGKPRGYAFIEY

SEQ ID NO: 3770 - protein, 20 aa, Homo sapiens
RPDAEYWNSQKDLLEQKRGR

SEQ ID NO: 3771 - protein, 20 aa, Homo sapiens
RPDAEYWNSQKDLLEQRRAA

SEQ ID NO: 3772 - protein, 11 aa, Homo sapiens
RRREGPDRSPR

SEQ ID NO: 3773 - protein, 29 aa, Bos taurus
SGRGKGGKGLGKGGAKRHRKVLRDNIQGI

SEQ ID NO: 3774 - protein, 24 aa, Homo sapiens
SQFGQILDILVSRSLKMRGQAFVI

SEQ ID NO: 3775 - protein, 15 aa, Homo sapiens
TGALDVIRNFTLDMI

SEQ ID NO: 3776 - protein, 18 aa, Bos taurus
TKPAIRRLARRGGVKRIS

SEQ ID NO: 3777 - protein, 22 aa, Homo sapiens
TKYKQRNGWSHKDLLRLSHLKP

SEQ ID NO: 3778 - protein, 20 aa, Homo sapiens
TLHKAFKGSIFVVFDSIESA

SEQ ID NO: 3779 - protein, 21 aa, Homo sapiens
VCEKLCNEKLLKKARIHPFHI

SEQ ID NO: 3780 - protein, 37 aa, Homo sapiens; identical to SEQ ID NO: 3149

SEQ ID NO: 3781 - protein, 15 aa, Homo sapiens
VSKDDSIISSLDVTD

SEQ ID NO: 3782 - protein, 20 aa, Mus musculus
YDERPGPSPLPHRDRDRDRE

SEQ ID NO: 3783 - protein, 21 aa, Mus musculus
YLPPLEKLPHEKHHNQPYCGI

SEQ ID NO: 3784 - protein, 15 aa, Homo sapiens
AARGRGRGMGRGNIF

SEQ ID NO: 3785 - protein, 15 aa, Homo sapiens
AARGRGRGMGRGNIF

SEQ ID NO: 3786 - protein, 15 aa, Homo sapiens
AIALREYRKKMDIPA

SEQ ID NO: 3787 - protein, 20 aa, Homo sapiens
AIVTKYITKGWKEVHELYKE

SEQ ID NO: 3788 - protein, 20 aa, Homo sapiens
ANNGNLQLRNKEVTWEVLEG

SEQ ID NO: 3789 - protein, 15 aa, Homo sapiens
ARGRGRGMGRGNIFQ

SEQ ID NO: 3790 - skipped

SEQ ID NO: 3791 - protein, 6 aa, Homo sapiens
DGQFCH

SEQ ID NO: 3792 - protein, 20 aa, Homo sapiens
DLLRLSHLKPSSEGLAIVTK

SEQ ID NO: 3793 - protein, 15 aa, Homo sapiens
DVEPKVKSKKREAVA

SEQ ID NO: 3794 - protein, 15 aa, Homo sapiens
DVEPKVKSKKREAVA

SEQ ID NO: 3795 - protein, 15 aa, Homo sapiens
EAVAGRGRGRGRGRG

SEQ ID NO: 3796 - protein, 18 aa, Homo sapiens
EKALSVETEKLLKYLEAV

SEQ ID NO: 3797 - protein, 13 aa, Homo sapiens
ERDRKREKRKPKS

SEQ ID NO: 3798 - protein, 8 aa, Homo sapiens
GQIPPGAM

SEQ ID NO: 3799 - protein, 15 aa, Homo sapiens
GRGRGMGRGNIFQKR

SEQ ID NO: 3800 - protein, 13 aa, Homo sapiens
GRGRGRGRGGPRR

SEQ ID NO: 3801 - protein, 15 aa, Homo sapiens
GRGRGRGRGRGGPRR

SEQ ID NO: 3802 - protein, 15 aa, Homo sapiens
GRGRGRGRGRGGPRR

SEQ ID NO: 3803 - protein, 13 aa, Homo sapiens
GRGRGRGRGRGRG

SEQ ID NO: 3804 - protein, 15 aa, Homo sapiens
GRGRGRGRGRGRGGP

SEQ ID NO: 3805 - protein, 15 aa, Homo sapiens
GRGRGRGRGRGRGRG

SEQ ID NO: 3806 - protein, 13 aa, Homo sapiens
GRGTVAAAAAAAT

SEQ ID NO: 3807 - protein, 16 aa, Homo sapiens
GSGKGKVQFQGKKTKF

SEQ ID NO: 3808 - protein, 12 aa, Homo sapiens
HMVYSKRSGKPR

SEQ ID NO: 3809 - protein, 27 aa, Homo sapiens
IPPGRGTPMGMPPPGMRPPPPGMRGLL

SEQ ID NO: 3810 - protein, 20 aa, Homo sapiens
KALSVETEKLLKYLEAVEKV

SEQ ID NO: 3811 - protein, 12 aa, Homo sapiens
KEEGSRSNLGWL

SEQ ID NO: 3812 - protein, 12 aa, Mus musculus
KFKGKATLTSDK

SEQ ID NO: 3813 - protein, 15 aa, Homo sapiens
KREAVAGRGRGRGRG

SEQ ID NO: 3814 - protein, 20 aa, Homo sapiens
KRTKDELEVIHLIEEHRLVR

SEQ ID NO: 3815 - protein, 13 aa, Homo sapiens
KVKSKKREAVAGR

SEQ ID NO: 3816 - protein, 15 aa, Homo sapiens
LDGPTYKRRLDECEE

SEQ ID NO: 3817 - protein, 13 aa, Homo sapiens
LKAVKMTLKNREP

SEQ ID NO: 3818 - protein, 15 aa, Homo sapiens
LKYYLAPKIEDEEGS

SEQ ID NO: 3819 - protein, 39 aa, Homo sapiens
MFEARLVQGSILKKVLEALKDLINEACWDISSSGVNLQS

SEQ ID NO: 3820 - protein, 13 aa, Homo sapiens
NTHLKAVKMTLKN

SEQ ID NO: 3821 - protein, 12 aa, Homo sapiens
NWHQLHGKKEAY

SEQ ID NO: 3822 - protein, 13 aa, Bos taurus
PEPAKSAPAPKKG

SEQ ID NO: 3823 - protein, 25 aa, Bos taurus
PEPAKSAPAPKKGSKKAVTKAQKKD

SEQ ID NO: 3824 - protein, 7 aa, Human alphaherpesvirus sp.
PKKKRKV

SEQ ID NO: 3825 - protein, 15 aa, Homo sapiens
PKVKSKKREAVAGRG

SEQ ID NO: 3826 - protein, 15 aa, Homo sapiens
PKVKSKKREAVAGRG

SEQ ID NO: 3827 - protein, 35 aa, Homo sapiens
PKVKSKKREAVAGRGRGRGRGRGRGRGRGRGGPRR

SEQ ID NO: 3828 - protein, 12 aa, Homo sapiens
QGFPFYDKPMRI

SEQ ID NO: 3829 - protein, 15 aa, Homo sapiens
QVAARGRGRGMGRGN

SEQ ID NO: 3830 - protein, 6 aa, Homo sapiens
QVKGFV

SEQ ID NO: 3831 - protein, 40 aa, Homo sapiens
QYPPGRGGPPPPMGRGAPPPGMMGPPPGMRPPMGPPMGIP

SEQ ID NO: 3832 - protein, 12 aa, Homo sapiens
RCRLCDEGHGLE

SEQ ID NO: 3833 - protein, 13 aa, Homo sapiens
REAVAGRGRGRGR

SEQ ID NO: 3834 - protein, 15 aa, Homo sapiens
RGRGMGRGNIFQKRR

SEQ ID NO: 3835 - protein, 15 aa, Homo sapiens
RGRGRGMGRGNIFQK

SEQ ID NO: 3836 - protein, 13 aa, Homo sapiens
RGRGRGRGRGRGG

SEQ ID NO: 3837 - protein, 13 aa, Homo sapiens
RGRGRGRGRGRGR

SEQ ID NO: 3838 - protein, 13 aa, Homo sapiens
SKKREAVAGRGRG

SEQ ID NO: 3839 - protein, 15 aa, Homo sapiens
SKKREAVAGRGRGRG

SEQ ID NO: 3840 - protein, 22 aa, Homo sapiens
TKYKQRNGWSHKDLLRLSHLKP

SEQ ID NO: 3841 - protein, 22 aa, Homo sapiens
TKYKQRNGWSHKDLLRLSHLKP

SEQ ID NO: 3842 - protein, 12 aa, Homo sapiens
TVETQNLEGLHH

SEQ ID NO: 3843 - protein, 15 aa, Homo sapiens
VAARGRGRGMGRGNI

SEQ ID NO: 3844 - protein, 13 aa, Homo sapiens
VAGRGRGRGRGRG

SEQ ID NO: 3845 - protein, 15 aa, Homo sapiens
VAGRGRGRGRGRGRG

SEQ ID NO: 3846 - protein, 25 aa, Homo sapiens
VAGRGRGRGRGRGRGRGRGRGGPRR

SEQ ID NO: 3847 - protein, 6 aa, Homo sapiens
VCEHCD

SEQ ID NO: 3848 - protein, 35 aa, Homo sapiens
VEPKVKKREAVAGRGRGRGRGRGRGRGRGRGGPRR

SEQ ID NO: 3849 - protein, 13 aa, Homo sapiens
VEPKVKSKKREAV

SEQ ID NO: 3850 - protein, 15 aa, Homo sapiens
VEPKVKSKKREAVAG

SEQ ID NO: 3851 - protein, 15 aa, Homo sapiens
VEPKVKSKKREAVAG

SEQ ID NO: 3852 - protein, 15 aa, Homo sapiens
VKSKKREAVAGRGRG

SEQ ID NO: 3853 - protein, 15 aa, Homo sapiens
VKSKKREAVAGRGRG

SEQ ID NO: 3854 - protein, 11 aa, Homo sapiens
VLVDVERGRTV

SEQ ID NO: 3855 - protein, 13 aa, Homo sapiens
VSMNTHLKAVKMT

SEQ ID NO: 3856 - protein, 9 aa, Homo sapiens
YITTIAGVM

SEQ ID NO: 3857 - protein, 20 aa, Homo sapiens
YKQRNGWSHKDLLRLSHLKP

SEQ ID NO: 3858 - protein, 609 aa, Homo sapiens
MSGWESYYKTEGDEEAEEEQEENLEASGDYKYSGRDSLIFLVDASKAMFESQSEDELTPFDMSIQCIQSVYISKIISSDRDLLAVVFYGTEKDKNSVNFKNIYVLQELDNPGAKRILELDQFKGQQGQKRFQDMMGHGSDYSLSEVLWVCANLFSDVQFKMSHKRIMLFTNEDNPHGNDSAKASRARTKAGDLRDTGIFLDLMHLKKPGGFDISLFYRDIISIAEDEDLRVHFEESSKLEDLLRKVRAKETRKRALSRLKLKLNKDIVISVGIYNLVQKALKPPPIKLYRETNEPVKTKTRTFNTSTGGLLLPSDTKRSQIYGSRQIILEKEETEELKRFDDPGLMLMGFKPLVLLKKHHYLRPSLFVYPEESLVIGSSTLFSALLIKCLEKEVAALCRYTPRRNIPPYFVALVPQEEELDDQKIQVTPPGFQLVFLPFADDKRKMPFTEKIMATPEQVGKMKAIVEKLRFTYRSDSFENPVLQQHFRNLEALALDLMEPEQAVDLTLPKVEAMNKRLGSLVDEFKELVYPPDYNPEGKVTKRKHDNEGSGSKRPKVEYSEEELKTHISKGTLGKFTVPMLKEACRAYGLKSGLKKQELLEALTKHFQD

SEQ ID NO: 3859 - protein, 119 aa, Homo sapiens
MKLVRFLMKLSHETVTIELKNGTQVHGTITGVDVSMNTHLKAVKMTLKNREPVQLETLSIRGNNIRYFILPDSLPLDTLLVDVEPKVKSKKREAVAGRGRGRGRGRGRGRGRGRGGPRR

SEQ ID NO: 3860 - protein, 10 aa, Homo sapiens
AAFYKTFKTV

SEQ ID NO: 3861 - protein, 15 aa, Homo sapiens
AEMKSLEEKIGCLLK

SEQ ID NO: 3862 - protein, 11 aa, Homo sapiens
ALLRNLGKMTA

SEQ ID NO: 3863 - protein, 14 aa, Homo sapiens
ALREYRKKMDIPAK

SEQ ID NO: 3864 - protein, 9 aa, Homo sapiens
AMKISFAKK

SEQ ID NO: 3865 - protein, 7 aa, Homo sapiens
APGMRPP

SEQ ID NO: 3866 - protein, 10 aa, Homo sapiens
APPPGMRPPM

SEQ ID NO: 3867 - protein, 19 aa, Mus musculus
APQGSLGEYLFERLTLKHD

SEQ ID NO: 3868 - protein, 15 aa, Homo sapiens
ATLDDIKEWLEDKGQ

SEQ ID NO: 3869 - protein, 14 aa, Homo sapiens
CSLPMIWAQKTNTP

SEQ ID NO: 3870 - protein, 9 aa, Homo sapiens
DRNGTHLDA

SEQ ID NO: 3871 - protein, 20 aa, Mus musculus
DSCPLDCKVYVGNLGNNGNK

SEQ ID NO: 3872 - protein, 9 aa, Homo sapiens
EALTKHFQD

SEQ ID NO: 3873 - protein, 14 aa, Homo sapiens
EAVEKVKRTKDELE

SEQ ID NO: 3874 - protein, 14 aa, Homo sapiens
EKVKRTKDELEVIH

SEQ ID NO: 3875 - protein, 15 aa, Homo sapiens
EQEAKQKLEEDAEMK

SEQ ID NO: 3876 - protein, 50 aa, Homo sapiens
FNGTFVKLNKASINMLRIVEPYIAWGYPNLKSVNELIYKRGYGKINKKRI

SEQ ID NO: 3877 - protein, 30 aa, Homo sapiens
GDAFKTLFVARVNYDTTESKLRREFEVYGP

SEQ ID NO: 3878 - protein, 21 aa, Homo sapiens
GIIDLIEKRKFNQNSNSTYCV

SEQ ID NO: 3879 - protein, 10 aa, Homo sapiens
GIMAPPPGMR

SEQ ID NO: 3880 - protein, 10 aa, Homo sapiens
GMRPPMGPPI

SEQ ID NO: 3881 - protein, 13 aa, Homo sapiens
GQILDILVSRSLK

SEQ ID NO: 3882 - protein, 20 aa, Mus musculus
HHNTLVCSVTDFYPAKIKVR

SEQ ID NO: 3883 - protein, 8 aa, Homo sapiens
HKAFKGSI

SEQ ID NO: 3884 - protein, 8 aa, Homo sapiens
HKGFKGVD

SEQ ID NO: 3885 - protein, 16 aa, Homo sapiens
HLLTNHLKSKEVWKAL

SEQ ID NO: 3886 - protein, 20 aa, Mus musculus
HLQLAIRNDEELNKLLGKVT

SEQ ID NO: 3887 - protein, 18 aa, Mus musculus
HPPHIEIQMLKNGKKIPK

SEQ ID NO: 3888 - protein, 9 aa, Homo sapiens
IIAKMKGTF

SEQ ID NO: 3889 - protein, 10 aa, Homo sapiens
IMAPPPGMRP

SEQ ID NO: 3890 - protein, 15 aa, Homo sapiens
KFVETPGQKYKETDL

SEQ ID NO: 3891 - protein, 11 aa, Homo sapiens
KIKKDELKKSL

SEQ ID NO: 3892 - protein, 15 aa, Homo sapiens
LAVTKYKQRNGWSHK

SEQ ID NO: 3893 - protein, 40 aa, Homo sapiens
LEKDEREQLRILGEKEAKLAQQSQALQELISELDRRCHSS

SEQ ID NO: 3894 - protein, 9 aa, Homo sapiens
LKRVCAQIN

SEQ ID NO: 3895 - protein, 36 aa, Homo sapiens
LQELEKDEREQLRILGEKEAKLAQQSQALQELISEL

SEQ ID NO: 3896 - protein, 49 aa, Homo sapiens
LQELEKDEREQLRILGEKEAKLAQQSQALQELISELDRRCHSSALELLQ

SEQ ID NO: 3897 - protein, 9 aa, Homo sapiens
LRLSHLKPS

SEQ ID NO: 3898 - protein, 30 aa, Homo sapiens
LTLPKVEAMNKRLGSLVDEFKELVYPPDYN

SEQ ID NO: 3899 - protein, 8 aa, Homo sapiens
LYKEKALS

SEQ ID NO: 3900 - protein, 10 aa, Homo sapiens
MAPPPGMRPP

SEQ ID NO: 3901 - protein, 26 aa, Homo sapiens
MEGVEEKKKEVPAVPETLKKKRRNFA

SEQ ID NO: 3902 - protein, 12 aa, Homo sapiens
MGRGAPPPGMMG

SEQ ID NO: 3903 - protein, 9 aa, Homo sapiens
MKCGMWGRA

SEQ ID NO: 3904 - protein, 24 aa, Homo sapiens
MLRKARRKLIYEKAKHYHKEYRQM

SEQ ID NO: 3905 - protein, 10 aa, Homo sapiens
MRPPMGPPIG

SEQ ID NO: 3906 - protein, 11 aa, Homo sapiens
MWGRALRKAIA

SEQ ID NO: 3907 - protein, 14 aa, Homo sapiens
NEKLLKKARIHPFH

SEQ ID NO: 3908 - protein, 9 aa, Homo sapiens
NLNEKIKKD

SEQ ID NO: 3909 - protein, 10 aa, Homo sapiens
PGIMAPPPGM

SEQ ID NO: 3910 - protein, 10 aa, Homo sapiens
PGMRPPMGPP

SEQ ID NO: 3911 - protein, 20 aa, Mus musculus
PGVTVKDVNQQEFVRALAAF

SEQ ID NO: 3912 - protein, 10 aa, Homo sapiens
PPGMRPPMGP

SEQ ID NO: 3913 - protein, 8 aa, Homo sapiens
PPPGIRGP

SEQ ID NO: 3914 - protein, 7 aa, Homo sapiens
PPPGMRP

SEQ ID NO: 3915 - protein, 8 aa, Homo sapiens
PPPGMRPP

SEQ ID NO: 3916 - protein, 10 aa, Homo sapiens
PPPGMRPPMG

SEQ ID NO: 3917 - protein, 16 aa, Homo sapiens
QEMPLTALLRNLGKMT

SEQ ID NO: 3918 - protein, 9 aa, Homo sapiens
QETPATKKA

SEQ ID NO: 3919 - protein, 24 aa, Homo sapiens
RAYGLKSGLKKQELLEALTKHFQD

SEQ ID NO: 3920 - protein, 34 aa, Homo sapiens
RILELDQFKGQQGQKRFQDMMGHGSDYSLSEVLW

SEQ ID NO: 3921 - protein, 18 aa, Homo sapiens
RKGHFLLSSKSGFWTIWL

SEQ ID NO: 3922 - protein, 14 aa, Mus musculus
RMVNHFIAEFKRKH

SEQ ID NO: 3923 - protein, 15 aa, Mus musculus
RQVRFYDGVIELSLT

SEQ ID NO: 3924 - protein, 10 aa, Homo sapiens
RSGKPRGYAF

SEQ ID NO: 3925 - protein, 10 aa, Homo sapiens
RSLKMRGQAF

SEQ ID NO: 3926 - protein, 11 aa, Homo sapiens
SDDDMGFGLFD

SEQ ID NO: 3927 - protein, 12 aa, Homo sapiens
SEEELKTHISKG

SEQ ID NO: 3928 - protein, 50 aa, Homo sapiens
SEEELKTHISKGTLGKFTVPMLKEACRAYGLKSGLKKQELLEALTKHFQD

SEQ ID NO: 3929 - protein, 9 aa, Homo sapiens
SQEGRTTKQ

SEQ ID NO: 3930 - protein, 21 aa, Homo sapiens
SRIHAEFVQQKNFLVEEEQRQ

SEQ ID NO: 3931 - protein, 10 aa, Homo sapiens
STKQAAFKAV

SEQ ID NO: 3932 - protein, 8 aa, Homo sapiens
TEKLLKYL

SEQ ID NO: 3933 - protein, 12 aa, Homo sapiens
TFIQFKKDLKES

SEQ ID NO: 3934 - protein, 11 aa, Homo sapiens
TYYIKEQKLGL

SEQ ID NO: 3935 - protein, 9 aa, Homo sapiens
VEPTGKRFL

SEQ ID NO: 3936 - protein, 19 aa, Mus musculus
VFRRYVEVGRVAYISFSPH

SEQ ID NO: 3937 - protein, 12 aa, Homo sapiens
VGRATPPPGIMA

SEQ ID NO: 3938 - protein, 21 aa, Homo sapiens
VSLVCEEKLCNEKLLKKARIH

SEQ ID NO: 3939 - protein, 13 aa, Homo sapiens
VTKYITKGWKEVH

SEQ ID NO: 3940 - protein, 17 aa, Mus musculus
VVKKGTDFQLNQLEGKK

SEQ ID NO: 3941 - protein, 15 aa, Homo sapiens
YKTGHGLRGKLKWRP

SEQ ID NO: 3942 - protein, 8 aa, Homo sapiens
AAAAAPAK

SEQ ID NO: 3943 - protein, 22 aa, Mus musculus
AGRGRGRGRGRGRGRGRGRGSL

SEQ ID NO: 3944 - protein, 22 aa, Homo sapiens
AKVEAKEESEESDEDMGFGLFD

SEQ ID NO: 3945 - protein, 15 aa, Homo sapiens
ALGGNSSPSAKDIKK

SEQ ID NO: 3946 - protein, 15 aa, Homo sapiens
APAAGSAPAAAEEKK

SEQ ID NO: 3947 - protein, 24 aa, Homo sapiens
AVHGERLHLFCEKDGKALCWVCAQ

SEQ ID NO: 3948 - protein, 16 aa, Homo sapiens
CAFTGPLRPFFSPGFN

SEQ ID NO: 3949 - protein, 15 aa, Homo sapiens
CHSSALELLQEVIIV

SEQ ID NO: 3950 - protein, 15 aa, Homo sapiens
DDRLNKVISELNGKN

SEQ ID NO: 3951 - protein, 15 aa, Homo sapiens
DEKKEESEESDDDMG

SEQ ID NO: 3952 - protein, 8 aa, Homo sapiens
DMGFGLFD

SEQ ID NO: 3953 - protein, 16 aa, Homo sapiens
ECISQVGKGGGSVCAV

SEQ ID NO: 3954 - protein, 24 aa, Homo sapiens
EEVTCPICLDPFVEPVSIECGHSF

SEQ ID NO: 3955 - protein, 15 aa, Homo sapiens
ESEESDDDMGFGLFD

SEQ ID NO: 3956 - protein, 16 aa, Homo sapiens
FHSGKHYWEVDVTGKE

SEQ ID NO: 3957 - protein, 15 aa, unidentified
  REGION 1..15: note = epitope involved in systemic lupus
FIEWNKLRFRQGLEW

SEQ ID NO: 3958 - protein, 13 aa, unidentified
  REGION 1..13: note = epitope involved in systemic lupus
GGGRDRDRDRGGG

SEQ ID NO: 3959 - protein, 8 aa, Homo sapiens
GIARVPLA

SEQ ID NO: 3960 - protein, 15 aa, Homo sapiens
GIEADDDRLNKVISE

SEQ ID NO: 3961 - protein, 16 aa, Homo sapiens
GKALCWVCAQSRKHRD

SEQ ID NO: 3962 - protein, 20 aa, Homo sapiens
GKALCWVCAQSRKHRDHAMV

SEQ ID NO: 3963 - protein, 23 aa, Homo sapiens
GKKKSKPVNKDRYISKMFLRGDS

SEQ ID NO: 3964 - protein, 15 aa, Human alphaherpesvirus sp.
GKTCPKEIPKGSKNT

SEQ ID NO: 3965 - protein, 16 aa, Homo sapiens
GLKKMLRTCAVHITLD

SEQ ID NO: 3966 - protein, 11 aa, Homo sapiens
GSIYNPEVLDI

SEQ ID NO: 3967 - protein, 8 aa, Homo sapiens
GVGGPSQQ

SEQ ID NO: 3968 - protein, 8 aa, Homo sapiens
GVGRAAGR

SEQ ID NO: 3969 - protein, 8 aa, Homo sapiens
GVPAGVPI

SEQ ID NO: 3970 - protein, 15 aa, Homo sapiens
IEDVIAQGIGKLASV

SEQ ID NO: 3971 - protein, 17 aa, Homo sapiens
IWLWNKQKYEAGTYPQT

SEQ ID NO: 3972 - protein, 23 aa, Homo sapiens
KAQVAARGRGRGMGRGNIFQKRR

SEQ ID NO: 3973 - protein, 15 aa, Homo sapiens
KDIKKILDSVGIEAD

SEQ ID NO: 3974 - protein, 18 aa, Homo sapiens
KEISQEAREGTQGERCAV

SEQ ID NO: 3975 - protein, 15 aa, Homo sapiens
LNGKNIEDVIAQGIG

SEQ ID NO: 3976 - protein, 16 aa, Homo sapiens
LSEDRRQVRLGDTQQS

SEQ ID NO: 3977 - protein, 13 aa, Homo sapiens
MASAARLTMMWEE

SEQ ID NO: 3978 - protein, 31 aa, Homo sapiens
MLKNAPMLKSMKNKNQGSGAGRGKAAILKAQ

SEQ ID NO: 3979 - protein, 8 aa, Homo sapiens
MMRKAIRG

SEQ ID NO: 3980 - protein, 13 aa, Homo sapiens
MSLLNKPKSEMTP

SEQ ID NO: 3981 - protein, 17 aa, Homo sapiens
NITDHGSLIYSFSECAF

SEQ ID NO: 3982 - protein, 21 aa, Homo sapiens
NSQDGYVWQVTDMNRLHRFLC

SEQ ID NO: 3983 - protein, 15 aa, Homo sapiens
PAGGAVAVSAAPGSA

SEQ ID NO: 3984 - protein, 8 aa, Homo sapiens
PAPGMRPP

SEQ ID NO: 3985 - protein, 18 aa, Mus musculus
PEPAKSAPAPKKGSKKAV

SEQ ID NO: 3986 - protein, 18 aa, Mus musculus
PEPAKSAPAPKKGSKKAV

SEQ ID NO: 3987 - protein, 49 aa, Mus musculus; identical to SEQ ID NO: 3159

SEQ ID NO: 3988 - protein, 7 aa, Homo sapiens
PPGIRGP

SEQ ID NO: 3989 - protein, 8 aa, Homo sapiens
PPPGMIPP

SEQ ID NO: 3990 - protein, 8 aa, Homo sapiens
PPPGMRGP

SEQ ID NO: 3991 - protein, 19 aa, Homo sapiens
PQTPLHLQVPPCQVGIFLD

SEQ ID NO: 3992 - protein, 13 aa, Homo sapiens
QALGITTKISRGT

SEQ ID NO: 3993 - protein, 9 aa, Homo sapiens
QVYIRGSKI

SEQ ID NO: 3994 - protein, 8 aa, Homo sapiens
RATWKSNY

SEQ ID NO: 3995 - protein, 15 aa, Homo sapiens
RDMLLANKVPAAARA

SEQ ID NO: 3996 - protein, 11 aa, Homo sapiens
RDRDRDRDRDR

SEQ ID NO: 3997 - protein, 8 aa, Homo sapiens
RDRDRDRE

SEQ ID NO: 3998 - protein, 8 aa, Homo sapiens
RNPLIAGK

SEQ ID NO: 3999 - protein, 13 aa, Bos taurus
SAPAPKKGSKKAV

SEQ ID NO: 4000 - protein, 17 aa, Homo sapiens
SPGFNDGGKNTAPLTLC

SEQ ID NO: 4001 - protein, 17 aa, Homo sapiens
SQALQELISELDRRCHS

SEQ ID NO: 4002 - protein, 15 aa, Homo sapiens
SSPSAKDIKKILDSV

SEQ ID NO: 4003 - protein, 12 aa, Homo sapiens
SVLTQSVKNNTQ

SEQ ID NO: 4004 - protein, 15 aa, Homo sapiens
SVSYDDWDYSLEARV

SEQ ID NO: 4005 - protein, 14 aa, Homo sapiens
TGEVYRGKLIEAED

SEQ ID NO: 4006 - protein, 15 aa, Homo sapiens
VAVSAAPGSAAPAAG

SEQ ID NO: 4007 - protein, 15 aa, Homo sapiens [sequence omitted]

SEQ ID NO: 4008 - protein, 16 aa, Homo sapiens
VHGERLHLFCEKDGKA

SEQ ID NO: 4009 - protein, 11 aa, Homo sapiens
WTEVPKSGKGK

SEQ ID NO: 4010 - protein, 17 aa, Homo sapiens
YQEKLQVALGELRRKQE

SEQ ID NO: 4011 - protein, 14 aa, Homo sapiens
AETREERMERKRRE

SEQ ID NO: 4012 - protein, 9 aa, Homo sapiens
AFQQGKIPP

SEQ ID NO: 4013 - protein, 22 aa, Homo sapiens
AKGKPDAAKKGVVKAEKSKKKK

SEQ ID NO: 4014 - protein, 20 aa, Homo sapiens
EEASGSSVTAEEAKKFLAPK

SEQ ID NO: 4015 - protein, 8 aa, Homo sapiens
GMMPAPHM

SEQ ID NO: 4016 - protein, 9 aa, Homo sapiens
GPAPGMRPP

SEQ ID NO: 4017 - protein, 9 aa, Homo sapiens
GPPMMRPPA

SEQ ID NO: 4018 - protein, 10 aa, Homo sapiens
GPPRPGMMPA

SEQ ID NO: 4019 - protein, 8 aa, Homo sapiens
HDSPSVRK

SEQ ID NO: 4020 - protein, 8 aa, Homo sapiens
KDYYQKWM

SEQ ID NO: 4021 - protein, 8 aa, Homo sapiens
KIPPTPFS

SEQ ID NO: 4022 - protein, 30 aa, Homo sapiens
LALVFEAPNQEKVSDYEMKLMDLDVEQLGI

SEQ ID NO: 4023 - protein, 7 aa, Homo sapiens
MERKRRE

SEQ ID NO: 4024 - protein, 8 aa, Homo sapiens
PFSAPPPA

SEQ ID NO: 4025 - protein, 7 aa, Human alphaherpesvirus sp.
PPPGRRP

SEQ ID NO: 4026 - protein, 9 aa, Homo sapiens
PPPPGMMPV

SEQ ID NO: 4027 - protein, 8 aa, Homo sapiens
PPPPSLPG

SEQ ID NO: 4028 - protein, 32 aa, Homo sapiens
RERRRSHRSERERRRDRDRDRDRDREHKRGER

SEQ ID NO: 4029 - protein, 10 aa, Homo sapiens
RKTHCSGRKH

SEQ ID NO: 4030 - protein, 10 aa, Homo sapiens
TRPGMTRPDR

SEQ ID NO: 4031 - protein, 20 aa, Mus musculus
YYCARFLWEPYAMDYWGQGS

SEQ ID NO: 4032 - protein, 34 aa, Homo sapiens
AVAATASIAGAPTQYPPGRGTPPPPVGRATPPPG

SEQ ID NO: 4033 - protein, 13 aa, Homo sapiens
GIMAPPPGMRPPM

SEQ ID NO: 4034 - protein, 22 aa, Homo sapiens
GVGGPSQQVMTPQGRGTVAAAA

SEQ ID NO: 4035 - protein, 11 aa, Homo sapiens
MGPPIGLPPAR

SEQ ID NO: 4036 - protein, 32 aa, Homo sapiens
RGTPIGMPPPGMRPPPPGIRGPPPPGMRPPRP

SEQ ID NO: 4037 - protein, 20 aa, Homo sapiens
EALKKIIEDQQESLNKWKSK

SEQ ID NO: 4038 - protein, 20 aa, Homo sapiens
ETPGQKYKETDLLILFKDDY

SEQ ID NO: 4039 - protein, 20 aa, Homo sapiens
FSNHGEIKWIDFVRGAKEGI

SEQ ID NO: 4040 - protein, 6 aa, Homo sapiens
GLELPE

SEQ ID NO: 4041 - protein, 20 aa, Homo sapiens
HPMLPNYKNFKGTIQELGQN

SEQ ID NO: 4042 - protein, 6 aa, Bos taurus
IRGERA

SEQ ID NO: 4043 - protein, 4 aa, Homo sapiens
KIRY

SEQ ID NO: 4044 - protein, 4 aa, Homo sapiens
KKIK

SEQ ID NO: 4045 - protein, 4 aa, Homo sapiens
KNDK

SEQ ID NO: 4046 - protein, 4 aa, Homo sapiens
LDKK

SEQ ID NO: 4047 - protein, 20 aa, Homo sapiens
LILFKDDYFAKKNEERKQNK

SEQ ID NO: 4048 - protein, 12 aa, Homo sapiens
NGNLQLRNKEVT

SEQ ID NO: 4049 - protein, 5 aa, Homo sapiens
PIVET

SEQ ID NO: 4050 - protein, 7 aa, Homo sapiens
QFIGYPI

SEQ ID NO: 4051 - protein, 20 aa, Homo sapiens
SDYKSAHKGFKGVDAQGTLS

SEQ ID NO: 4052 - protein, 5 aa, Homo sapiens
SKEQV

SEQ ID NO: 4053 - protein, 20 aa, Homo sapiens
VRGAKEGIILFKEKAKEALG

SEQ ID NO: 4054 - protein, 10 aa, Homo sapiens
EWEDTYGIVL

SEQ ID NO: 4055 - protein, 10 aa, Staphylococcus aureus
EWESTYSILG

SEQ ID NO: 4056 - protein, 50 aa, Homo sapiens; identical to SEQ ID NO: 3165

SEQ ID NO: 4057 - protein, 23 aa, Homo sapiens
KMLKNREPVQLETLSIRGNRIRY

SEQ ID NO: 4058 - protein, 10 aa, Human alphaherpesvirus sp.
LWDQTYGVPD

SEQ ID NO: 4059 - protein, 25 aa, Homo sapiens
PAVPETLKKKRRNFAELKIKRLRKK

SEQ ID NO: 4060 - protein, 19 aa, Homo sapiens
RMARMARKAGNFYVPAEPK

SEQ ID NO: 4061 - protein, 10 aa, Human alphaherpesvirus sp.
TWNDTYGSNN

SEQ ID NO: 4062 - protein, 10 aa, Homo sapiens
TYGIVLLSGV

SEQ ID NO: 4063 - protein, 14 aa, Bos taurus
ALQEACEAYLVGLF

SEQ ID NO: 4064 - protein, 11 aa, Human alphaherpesvirus sp.
EDDDMGFGLFD

SEQ ID NO: 4065 - protein, 21 aa, Homo sapiens
GGGGGGSGGGGSGGGGGGGSS

SEQ ID NO: 4066 - protein, 18 aa, Bos taurus
RFQSSAVMALQEACEAYL

SEQ ID NO: 4067 - protein, 11 aa, Homo sapiens
TFIQFKKDLKE

SEQ ID NO: 4068 - protein, 21 aa, Bos taurus
ARTKQTARKSTGGKAPRKQLA

SEQ ID NO: 4069 - protein, 16 aa, Bos taurus
AVTYTEHAKRKTVTAM

SEQ ID NO: 4070 - protein, 18 aa, Bos taurus
GAGAPVYLAAVLEYLTAE

SEQ ID NO: 4071 - protein, 7 aa, Escherichia coli
ILPPPGY

SEQ ID NO: 4072 - protein, 20 aa, Bos taurus
IQTAVRLLLPGELAKHAVSE

SEQ ID NO: 4073 - protein, 15 aa, Bos taurus
KQLATKAARKSAPAT

SEQ ID NO: 4074 - protein, 21 aa, Bos taurus
LAGNAARDNKKTRIIPRHLQL

SEQ ID NO: 4075 - protein, 16 aa, Bos taurus
LAIRNDEELNKLLGKV

SEQ ID NO: 4076 - protein, 14 aa, Bos taurus
LPKKTESHHKAKGK

SEQ ID NO: 4077 - protein, 15 aa, Bos taurus
MSGRGKQGGKARAKA

SEQ ID NO: 4078 - protein, 16 aa, Bos taurus
PATGGVKKPHRYRPGT

SEQ ID NO: 4079 - protein, 16 aa, Bos taurus
RYRPGTVALREIRRYQ

SEQ ID NO: 4080 - protein, 7 aa, Mus musculus
SPLNVLM

SEQ ID NO: 4081 - protein, 7 aa, Human alphaherpesvirus sp.
SPPEWLK

SEQ ID NO: 4082 - protein, 16 aa, Bos taurus
VHPDTGISSKAMGIMN

SEQ ID NO: 4083 - protein, 15 aa, Bos taurus
VSEGTKAVTKYTSSK

SEQ ID NO: 4084 - protein, 8 aa, Homo sapiens
ADGKKIDG

SEQ ID NO: 4085 - protein, 8 aa, Homo sapiens
AIALREYR

SEQ ID NO: 4086 - protein, 8 aa, Homo sapiens
AICSQCSD

SEQ ID NO: 4087 - protein, 8 aa, unidentified
  REGION 1..8: note = epitope involved in systemic lupus
AKAKAKAK

SEQ ID NO: 4088 - protein, 16 aa, Homo sapiens
ALAVTKYKQRNGWSHK

SEQ ID NO: 4089 - protein, 8 aa, Homo sapiens
ALFAPRDP

SEQ ID NO: 4090 - protein, 10 aa, Homo sapiens
ASAARLTMMW

SEQ ID NO: 4091 - protein, 11 aa, Homo sapiens
AVEKVKRTKDE

SEQ ID NO: 4092 - protein, 16 aa, Homo sapiens
DVEPKVKSKKREAVAG

SEQ ID NO: 4093 - protein, 22 aa, Homo sapiens
EKDSYVVAFSDEMVPCPVTTDM

SEQ ID NO: 4094 - protein, 10 aa, Homo sapiens
ERMERKRREK

SEQ ID NO: 4095 - protein, 15 aa, Homo sapiens
FTFIQFKKDLKESMK

SEQ ID NO: 4096 - protein, 8 aa, Homo sapiens
GTQVHGTI

SEQ ID NO: 4097 - protein, 8 aa, Homo sapiens
HPAIALRE

SEQ ID NO: 4098 - protein, 8 aa, Homo sapiens
IALREYRK

SEQ ID NO: 4099 - protein, 8 aa, Homo sapiens
ILPDSLPL

SEQ ID NO: 4100 - protein, 15 aa, Homo sapiens
KDKDRDRKRRSSRSR

SEQ ID NO: 4101 - protein, 8 aa, unidentified
  REGION 1..8: note = epitope involved in systemic lupus
KKAKAKAK

SEQ ID NO: 4102 - protein, 15 aa, Homo sapiens
KKAPAKKGEKVPKGK

SEQ ID NO: 4103 - protein, 4 aa, unidentified
  REGION 1..4: note = epitope involved in systemic lupus
KKKK

SEQ ID NO: 4104 - protein, 16 aa, Homo sapiens
LCNEKLLKKARIHPFH

SEQ ID NO: 4105 - protein, 16 aa, Homo sapiens
LFKPPKYHPDVPYVKR

SEQ ID NO: 4106 - protein, 8 aa, Homo sapiens
LLVDVEPK

SEQ ID NO: 4107 - protein, 12 aa, Homo sapiens
LPMIWAQKTNTP

SEQ ID NO: 4108 - protein, 15 aa, Homo sapiens
LRKFKNISYFPGKLR

SEQ ID NO: 4109 - protein, 8 aa, Homo sapiens
LTALLRNL

SEQ ID NO: 4110 - protein, 22 aa, Homo sapiens
MEESVNQMQPLNEKQIANSQDG

SEQ ID NO: 4111 - protein, 8 aa, Homo sapiens
MPLTALLR

SEQ ID NO: 4112 - protein, 14 aa, Homo sapiens
NTHLKAVKMTLKNR

SEQ ID NO: 4113 - protein, 8 aa, Homo sapiens
PAIALREY

SEQ ID NO: 4114 - protein, 8 aa, Homo sapiens
PLTALLRN

SEQ ID NO: 4115 - protein, 15 aa, Homo sapiens
QRRSARLSAKPAPPK

SEQ ID NO: 4116 - protein, 8 aa, unidentified
  REGION 1..8: note = epitope involved in systemic lupus
RARARARA

SEQ ID NO: 4117 - protein, 28 aa, Homo sapiens
REAVAGRGRGRGRGRGRGRGRGRGGPRR

SEQ ID NO: 4118 - protein, 8 aa, Homo sapiens
RFLMKLSH

SEQ ID NO: 4119 - protein, 8 aa, unidentified
  REGION 1..8: note = epitope involved in systemic lupus
RRARARAR

SEQ ID NO: 4120 - protein, 4 aa, unidentified
  REGION 1..4: note = epitope involved in systemic lupus
RRRR

SEQ ID NO: 4121 - protein, 8 aa, Homo sapiens
RRRSRERS

SEQ ID NO: 4122 - protein, 8 aa, Homo sapiens
RRSHRSER

SEQ ID NO: 4123 - protein, 8 aa, Homo sapiens
RRSRSRDK

SEQ ID NO: 4124 - protein, 8 aa, Homo sapiens
SEGLAIVT

SEQ ID NO: 4125 - protein, 17 aa, Homo sapiens
SKLIKIFQDHPLQKTYN

SEQ ID NO: 4126 - protein, 8 aa, Homo sapiens
SRERSKDK

SEQ ID NO: 4127 - protein, 8 aa, Homo sapiens
TALLRNLG

SEQ ID NO: 4128 - protein, 8 aa, Homo sapiens
TLKNREPV

SEQ ID NO: 4129 - protein, 16 aa, Homo sapiens
TYKTGHGLRGKLKWRP

SEQ ID NO: 4130 - protein, 8 aa, Homo sapiens
VERGRTVK

SEQ ID NO: 4131 - protein, 8 aa, Homo sapiens
VHPAIALR

SEQ ID NO: 4132 - protein, 8 aa, Homo sapiens
VKGWRPRR

SEQ ID NO: 4133 - protein, 12 aa, Homo sapiens
VYSKRSGKPRGY

SEQ ID NO: 4134 - protein, 15 aa, Homo sapiens
YKHADGKKIDGRRVL

SEQ ID NO: 4135 - protein, 15 aa, Mus musculus
AKSAPAPKKGSKKAV

SEQ ID NO: 4136 - protein, 15 aa, Mus musculus
APAPKKGSKKAVTKA

SEQ ID NO: 4137 - protein, 15 aa, Bos taurus
AYLVGLFEDTNLCAI

SEQ ID NO: 4138 - protein, 15 aa, Mus musculus
DGKKRKRSRKESYSV

SEQ ID NO: 4139 - protein, 15 aa, Homo sapiens
FLENVIRDAVTYTEH

SEQ ID NO: 4140 - protein, 15 aa, Mus musculus
GGAKRHRKVLRDNIQ

SEQ ID NO: 4141 - protein, 15 aa, Mus musculus
GITKPAIRRIARRGG

SEQ ID NO: 4142 - protein, 15 aa, Homo sapiens
GKGGKGLGKGGAKRH

SEQ ID NO: 4143 - protein, 15 aa, Mus musculus
GKGLGKGGAKRHRKV

SEQ ID NO: 4144 - protein, 15 aa, Mus musculus
IMMSFVNDIFERIAG

SEQ ID NO: 4145 - protein, 15 aa, Mus musculus
IRRIARRGGVKRISG

SEQ ID NO: 4146 - protein, 15 aa, Mus musculus
ISGLIYEETRGVLKV

SEQ ID NO: 4147 - protein, 15 aa, Mus musculus
KPAIRRIARRGGVKR

SEQ ID NO: 4148 - protein, 24 aa, Mus musculus
KRHRKVLRDNIQGITKPAIRRIAR

SEQ ID NO: 4149 - protein, 15 aa, Mus musculus
LGKGGAKRHRKVLRD

SEQ ID NO: 4150 - protein, 15 aa, Mus musculus
LKVFLENVIRDAVTY

SEQ ID NO: 4151 - protein, 15 aa, Mus musculus
NDIFERIAGEASRLA

SEQ ID NO: 4152 - protein, 15 aa, Homo sapiens
NVIRDAVTYTEHAKR

SEQ ID NO: 4153 - protein, 15 aa, Mus musculus
PEPAKSAPAPKKGSK

SEQ ID NO: 4154 - protein, 24 aa, Mus musculus
PKKGSKKAVTKAQKKDGKKRKRSR

SEQ ID NO: 4155 - protein, 15 aa, Mus musculus
QKKDGKKRKRSRKES

SEQ ID NO: 4156 - protein, 15 aa, Mus musculus
RDAVTYTEHAKRKTV

SEQ ID NO: 4157 - protein, 15 aa, Mus musculus
RGVLKVFLENVIRDA

SEQ ID NO: 4158 - protein, 15 aa, Homo sapiens
SGRGKGGKGLGKGGA

SEQ ID NO: 4159 - protein, 15 aa, Mus musculus
SREIQTAVRLLLPGE

SEQ ID NO: 4160 - protein, 15 aa, Homo sapiens
YALKRQGRTLYGFGG

SEQ ID NO: 4161 - protein, 10 aa, Homo sapiens
AAFQQGKIPP

SEQ ID NO: 4162 - protein, 8 aa, Homo sapiens
AMPPQQLM

SEQ ID NO: 4163 - protein, 10 aa, Homo sapiens
APGMRPPMGG

SEQ ID NO: 4164 - protein, 8 aa, Homo sapiens
ATKKAVQG

SEQ ID NO: 4165 - protein, 8 aa, Homo sapiens
EVRLVPGR

SEQ ID NO: 4166 - protein, 10 aa, Homo sapiens
FQQGKIPPTP

SEQ ID NO: 4167 - protein, 8 aa, Homo sapiens
GAMPPQQL

SEQ ID NO: 4168 - protein, 8 aa, Homo sapiens
GMIPPPGL

SEQ ID NO: 4169 - protein, 8 aa, Homo sapiens
GMPPMTQA

SEQ ID NO: 4170 - protein, 10 aa, Homo sapiens
GPAPGMRPPM

SEQ ID NO: 4171 - protein, 8 aa, Homo sapiens
GQPPYMPP

SEQ ID NO: 4172 - protein, 8 aa, Homo sapiens
IGTFKAFD

SEQ ID NO: 4173 - protein, 8 aa, Homo sapiens
IPPGAMPP

SEQ ID NO: 4174 - protein, 8 aa, Homo sapiens
IPPPGLAP

SEQ ID NO: 4175 - protein, 8 aa, Homo sapiens
KPKSQETP

SEQ ID NO: 4176 - protein, 8 aa, Homo sapiens
MIPPPGLA

SEQ ID NO: 4177 - protein, 8 aa, Homo sapiens
MPPMTQAP

SEQ ID NO: 4178 - protein, 8 aa, Homo sapiens
MPPPGMIP

SEQ ID NO: 4179 - protein, 8 aa, Homo sapiens
MPPQQLMP

SEQ ID NO: 4180 - protein, 8 aa, Homo sapiens
MTQAPRIM

SEQ ID NO: 4181 - protein, 8 aa, Homo sapiens
PATKKAVQ

SEQ ID NO: 4182 - protein, 8 aa, Homo sapiens
PGAMPPQQ

SEQ ID NO: 4183 - protein, 8 aa, Homo sapiens
PGMIPPPG

SEQ ID NO: 4184 - protein, 8 aa, Homo sapiens
PMTQAPRI

SEQ ID NO: 4185 - protein, 8 aa, Homo sapiens
PPAQPLSE

SEQ ID NO: 4186 - protein, 8 aa, Homo sapiens
PPGAMPPQ

SEQ ID NO: 4187 - protein, 8 aa, Homo sapiens
PPGMIPPP

SEQ ID NO: 4188 - protein, 8 aa, Homo sapiens
PPMTQAPR

SEQ ID NO: 4189 - protein, 8 aa, Homo sapiens
PPPGLAPG

SEQ ID NO: 4190 - protein, 8 aa, Homo sapiens
PPQQLMPG

SEQ ID NO: 4191 - protein, 8 aa, Homo sapiens
PPYMPPPG

SEQ ID NO: 4192 - protein, 10 aa, Homo sapiens
PVGPAPGMRP

SEQ ID NO: 4193 - protein, 8 aa, Homo sapiens
PYMPPPGM

SEQ ID NO: 4194 - protein, 8 aa, Homo sapiens
QPPYMPPP

SEQ ID NO: 4195 - protein, 8 aa, Homo sapiens
RGVGGPSQ

SEQ ID NO: 4196 - protein, 8 aa, Homo sapiens
TPATKKAV

SEQ ID NO: 4197 - protein, 8 aa, Homo sapiens
YMPPPGMI

SEQ ID NO: 4198 - protein, 40 aa, Homo sapiens
RREFEVYGPIKRIHMVYSKRSGKPRGYAFIEYEHERDMHS

SEQ ID NO: 4199 - protein, 17 aa, Homo sapiens
KILGNQGSFLTKGPSKL

SEQ ID NO: 4200 - protein, 12 aa, Homo sapiens
TYICEVEDQKEE

SEQ ID NO: 4201 - protein, 18 aa, Homo sapiens
AEIETDKATIGFEVQEEG

SEQ ID NO: 4202 - protein, 15 aa, Homo sapiens
GLKKMLRTCAVHITL

SEQ ID NO: 4203 - protein, 18 aa, Homo sapiens
SAPATGGVKKPHRYRPGT

SEQ ID NO: 4204 - protein, 15 aa, Homo sapiens
AGAGRVRTSARAGST

SEQ ID NO: 4205 - protein, 15 aa, Homo sapiens
APAPRTRYPTRAPSG

SEQ ID NO: 4206 - protein, 15 aa, Homo sapiens
ATARRKRRWATRGPA

SEQ ID NO: 4207 - protein, 15 aa, Human alphaherpesvirus sp.
AVLRAPQNPPPPGPQ

SEQ ID NO: 4208 - protein, 15 aa, Homo sapiens
CAGWALWRCALRWAE

SEQ ID NO: 4209 - protein, 15 aa, Human alphaherpesvirus sp.
DEYKRFMNYWTASNE

SEQ ID NO: 4210 - protein, 15 aa, Human alphaherpesvirus sp.
DPVGHPAAPRAPGPE

SEQ ID NO: 4211 - protein, 15 aa, Human alphaherpesvirus sp.
DRGEGNMLWIDWLSK

SEQ ID NO: 4212 - protein, 15 aa, Homo sapiens
DRRREGPDRSPRQPP

SEQ ID NO: 4213 - protein, 15 aa, Homo sapiens
GPDRSPRQPPVLPAA

SEQ ID NO: 4214 - protein, 15 aa, Homo sapiens
GPGAGDRRREGPDRS

SEQ ID NO: 4215 - protein, 15 aa, Homo sapiens
HPAFARAHGEAGAGR

SEQ ID NO: 4216 - protein, 15 aa, Homo sapiens
HRALARGPPARLGGE

SEQ ID NO: 4217 - protein, 15 aa, Homo sapiens
KRRWATRGPAHPAFA

SEQ ID NO: 4218 - protein, 15 aa, Homo sapiens
LRWAERQVGALGAES

SEQ ID NO: 4219 - protein, 15 aa, Homo sapiens
LWRCALRWAERQVGA

SEQ ID NO: 4220 - protein, 15 aa, Homo sapiens
PQDPRSPGPAPRHRR

SEQ ID NO: 4221 - protein, 15 aa, Homo sapiens
PRAPPARASYRRFRT

SEQ ID NO: 4222 - protein, 15 aa, Human alphaherpesvirus sp.
PRHGHSQGPWKPWSA

SEQ ID NO: 4223 - protein, 15 aa, Homo sapiens
PRHRHPQDPRSPGPA

SEQ ID NO: 4224 - protein, 15 aa, Homo sapiens
PRHRRPPRPDPRAPP

SEQ ID NO: 4225 - protein, 15 aa, Human alphaherpesvirus sp.
PRSRHPGGPGTPQIR

SEQ ID NO: 4226 - protein, 15 aa, Human alphaherpesvirus sp.
PSRRRRRRKATLAPA

SEQ ID NO: 4227 - protein, 15 aa, Homo sapiens
RAHGEAGAGRVRTSA

SEQ ID NO: 4228 - protein, 15 aa, Homo sapiens
RAPSGPRPPSRSQAQ

SEQ ID NO: 4229 - protein, 15 aa, Homo sapiens
RLGGEGPGAGDRRRE

SEQ ID NO: 4230 - protein, 15 aa, Homo sapiens
RLSPGHRALARGPPA

SEQ ID NO: 4231 - protein, 15 aa, Human alphaherpesvirus sp.
RVPRIPRDPRPPRPP

SEQ ID NO: 4232 - protein, 15 aa, Homo sapiens
SPGPAPRHRRPPRPD

SEQ ID NO: 4233 - protein, 15 aa, Homo sapiens
SWERRRLSPGHRALA

SEQ ID NO: 4234 - protein, 15 aa, Homo sapiens
TLRPAATARRKRRWA

SEQ ID NO: 4235 - protein, 15 aa, Homo sapiens
TPPRSVPRLRPRHRH

SEQ ID NO: 4236 - protein, 15 aa, Homo sapiens
TRGPAHPAFARAHGE

SEQ ID NO: 4237 - protein, 15 aa, Human alphaherpesvirus sp.
VASRPLFPPRSPGPS

SEQ ID NO: 4238 - protein, 15 aa, Homo sapiens
VPRLRPRHRHPQDPR

SEQ ID NO: 4239 - protein, 15 aa, Human alphaherpesvirus sp.
WWARRRRRWRRWKRR

SEQ ID NO: 4240 - protein, 15 aa, Sus scrofa
AKKGEKVPKGKKGKA

SEQ ID NO: 4241 - protein, 15 aa, Sus scrofa
AKPAPPKPEPKPKKA

SEQ ID NO: 4242 - protein, 15 aa, Sus scrofa
ARLSAKPAPPKPEPK

SEQ ID NO: 4243 - protein, 15 aa, Sus scrofa
EKVPKGKKGKADAGK

SEQ ID NO: 4244 - protein, 15 aa, Sus scrofa
EPKPKKAPAKKGEKV

SEQ ID NO: 4245 - protein, 14 aa, Human alphaherpesvirus sp.
GRGRGRGRGRGGRG

SEQ ID NO: 4246 - protein, 14 aa, Homo sapiens
IKKVATPKKASPKK

SEQ ID NO: 4247 - protein, 15 aa, Sus scrofa
KDEPQRRSARLSAKP

SEQ ID NO: 4248 - protein, 15 aa, Homo sapiens
KSPKKAKAAKPKKAP

SEQ ID NO: 4249 - protein, 15 aa, unidentified
  REGION 1..15: note = epitope involved in systemic lupus
KTPKKAKKPKTPKKA

SEQ ID NO: 4250 - protein, 15 aa, Homo sapiens
PKKSAKKTPKKAKKP

SEQ ID NO: 4251 - protein, 15 aa, Sus scrofa
PKRKAEGDAKGDKAK

SEQ ID NO: 4252 - protein, 15 aa, Sus scrofa
PPKPEPKPKKAPAKK

SEQ ID NO: 4253 - protein, 16 aa, Homo sapiens
AAAGYDVEKNNSRIKL

SEQ ID NO: 4254 - protein, 15 aa, Homo sapiens
AAAPAEEKKVEAKKE

SEQ ID NO: 4255 - protein, 15 aa, Homo sapiens
AAAPVAAATTAAPAA

SEQ ID NO: 4256 - protein, 16 aa, Homo sapiens
AAKPKTAKPKAAKPKK

SEQ ID NO: 4257 - protein, 15 aa, Homo sapiens
AAPAKVEAKEESEES

SEQ ID NO: 4258 - protein, 15 aa, Homo sapiens
AEEKKVEAKKEESEE

SEQ ID NO: 4259 - protein, 8 aa, Homo sapiens
AFDKHMNL

SEQ ID NO: 4260 - protein, 16 aa, Homo sapiens
AGAAKRKASGPPVSEL

SEQ ID NO: 4261 - protein, 15 aa, Homo sapiens
AGGPAPAAGAAPAGG

SEQ ID NO: 4262 - protein, 16 aa, Homo sapiens
AKKAGAAKAKKPAGAA

SEQ ID NO: 4263 - protein, 8 aa, Homo sapiens
ALLRNLGK

SEQ ID NO: 4264 - protein, 8 aa, Homo sapiens
ALREYRKK

SEQ ID NO: 4265 - protein, 15 aa, Homo sapiens
APAAGAAPAGGPAPS

SEQ ID NO: 4266 - protein, 16 aa, Homo sapiens
APKSPAKAKAVKPKAA

SEQ ID NO: 4267 - protein, 15 aa, Homo sapiens
APSTAAAPAEEKKVE

SEQ ID NO: 4268 - protein, 16 aa, Homo sapiens
ATPKKSAKKTPKKAKK

SEQ ID NO: 4269 - protein, 8 aa, Homo sapiens
ATPPPGIM

SEQ ID NO: 4270 - protein, 8 aa, Homo sapiens
CDEFRKIK

SEQ ID NO: 4271 - protein, 15 aa, Homo sapiens
CNVGAGGPAPAAGAA

SEQ ID NO: 4272 - protein, 15 aa, Homo sapiens
DNVGSKQMQQIRMSL

SEQ ID NO: 4273 - protein, 15 aa, Homo sapiens
DRATWKSNYFLKIIQ

SEQ ID NO: 4274 - protein, 15 aa, Homo sapiens
DRLNKVISELNGKNI

SEQ ID NO: 4275 - protein, 15 aa, Homo sapiens
DVQLIKTGDKVGASE

SEQ ID NO: 4276 - protein, 15 aa, Homo sapiens
EADDDRLNKVISELN

SEQ ID NO: 4277 - protein, 15 aa, Homo sapiens
EDKINALIKAAGVNV

SEQ ID NO: 4278 - protein, 8 aa, Homo sapiens
EGPPPKDT

SEQ ID NO: 4279 - protein, 15 aa, Homo sapiens
EILSDVQLIKTGDKV

SEQ ID NO: 4280 - protein, 15 aa, Homo sapiens
EKKEESEESDDDMGF

SEQ ID NO: 4281 - protein, 16 aa, Homo sapiens
EKTPVKKKARKSAGAA

SEQ ID NO: 4282 - protein, 15 aa, Homo sapiens
EKTSFFQALGITTKI

SEQ ID NO: 4283 - protein, 15 aa, Homo sapiens
ELNGKNIEDVIAQGI

SEQ ID NO: 4284 - protein, 15 aa, Homo sapiens
ESEESDEDMGFGLFD

SEQ ID NO: 4285 - protein, 8 aa, Homo sapiens
EYRKKMDI

SEQ ID NO: 4286 - protein, 15 aa, Homo sapiens
FFQALGITTKISRGT

SEQ ID NO: 4287 - protein, 8 aa, Homo sapiens
FKAFDKHM

SEQ ID NO: 4288 - protein, 15 aa, Homo sapiens
GAVAVSAAPGSAAPA

SEQ ID NO: 4289 - protein, 15 aa, Homo sapiens
GGNSSPSAKDIKKIL

SEQ ID NO: 4290 - protein, 15 aa, Homo sapiens
GKAVVLMGKNTMMRK

SEQ ID NO: 4291 - protein, 15 aa, Homo sapiens
GLGPEKTSFFQALGI

SEQ ID NO: 4292 - protein, 8 aa, Homo sapiens
GLPPARGT

SEQ ID NO: 4293 - protein, 8 aa, Homo sapiens
GMPPPGMR

SEQ ID NO: 4294 - protein, 8 aa, Homo sapiens
GPPPPGMR

SEQ ID NO: 4295 - protein, 15 aa, Homo sapiens
GSLICNVGAGGPAPA

SEQ ID NO: 4296 - protein, 8 aa, Homo sapiens
GTFKAFDK

SEQ ID NO: 4297 - protein, 8 aa, Homo sapiens
IGLPPARG

SEQ ID NO: 4298 - protein, 16 aa, Homo sapiens
IKLGLKSLVSKGTLVQ

SEQ ID NO: 4299 - protein, 15 aa, Homo sapiens
IKTGDKVGASEATLL

SEQ ID NO: 4300 - protein, 15 aa, Homo sapiens
IQQVFDNGSIYNPEV

SEQ ID NO: 4301 - protein, 8 aa, Homo sapiens
IWAQKTNT

SEQ ID NO: 4302 - protein, 15 aa, Homo sapiens
KAAGVNVEPFWPGLF

SEQ ID NO: 4303 - protein, 8 aa, Homo sapiens
KAFDKHMN

SEQ ID NO: 4304 - protein, 16 aa, Homo sapiens
KAKKPAAAAGAKKAKS

SEQ ID NO: 4305 - protein, 15 aa, Homo sapiens
KEESEESDEDMGFGL

SEQ ID NO: 4306 - protein, 17 aa, Homo sapiens
KEIKKVATPKKASKPKK

SEQ ID NO: 4307 - protein, 15 aa, Homo sapiens
KKEESEESDDDMGFG

SEQ ID NO: 4308 - protein, 16 aa, Homo sapiens
KLNKKAASGEAKPKAK

SEQ ID NO: 4309 - protein, 15 aa, Homo sapiens
KNIEDVIAQGIGKLA

SEQ ID NO: 4310 - protein, 16 aa, Homo sapiens
KSPKKAKAAKPKKAPK

SEQ ID NO: 4311 - protein, 15 aa, Gallus gallus
KSRKASKAKKVKRSK

SEQ ID NO: 4312 - protein, 15 aa, Homo sapiens
KVEAKEESEESDEDM

SEQ ID NO: 4313 - protein, 15 aa, Homo sapiens
KVEAKKEESEESDDD

SEQ ID NO: 4314 - protein, 15 aa, Homo sapiens
LAALGGNSSPSAKDI

SEQ ID NO: 4315 - protein, 15 aa, Homo sapiens
LADPSAFVAAAPVAA

SEQ ID NO: 4316 - protein, 8 aa, Homo sapiens
LPPARGTP

SEQ ID NO: 4317 - protein, 11 aa, Homo sapiens
LQELEKDEREQ

SEQ ID NO: 4318 - protein, 8 aa, Homo sapiens
LREYRKKM

SEQ ID NO: 4319 - protein, 8 aa, Homo sapiens
MAPPPGMR

SEQ ID NO: 4320 - protein, 15 aa, Homo sapiens
MSLRGKAVVLMGKNT

SEQ ID NO: 4321 - protein, 15 aa, Homo sapiens
PAAAAAPAKVEAKEE

SEQ ID NO: 4322 - protein, 16 aa, Homo sapiens
PAGAAKKPKKATGAAT

SEQ ID NO: 4323 - protein, 15 aa, Homo sapiens
PALEKLLPHIRGNVG

SEQ ID NO: 4324 - protein, 8 aa, Homo sapiens
PGRGTPPP

SEQ ID NO: 4325 - protein, 8 aa, Homo sapiens
PPARGTPI

SEQ ID NO: 4326 - protein, 8 aa, Homo sapiens
PPGRGTPP

SEQ ID NO: 4327 - protein, 8 aa, Homo sapiens
PPPGIMAP

SEQ ID NO: 4328 - protein, 8 aa, Homo sapiens
PTQYPPGR

SEQ ID NO: 4329 - protein, 15 aa, Homo sapiens
QQIRMSLRGKAVVLM

SEQ ID NO: 4330 - protein, 8 aa, Homo sapiens
QVMTPQGR

SEQ ID NO: 4331 - protein, 8 aa, Homo sapiens
RATPPPGI

SEQ ID NO: 4332 - protein, 8 aa, Homo sapiens
REYRKKMD

SEQ ID NO: 4333 - protein, 8 aa, Homo sapiens
RGTPPPPV

SEQ ID NO: 4334 - protein, 8 aa, Homo sapiens
RKKMDIPA

SEQ ID NO: 4335 - protein, 8 aa, Homo sapiens
RPPPPGIR

SEQ ID NO: 4336 - protein, 16 aa, Homo sapiens
RSGVSLAALKKALAAA

SEQ ID NO: 4337 - protein, 6 aa, Gallus gallus
SHPTYS

SEQ ID NO: 4338 - protein, 6 aa, Gallus gallus
SHYKVG

SEQ ID NO: 4339 - protein, 16 aa, Gallus gallus
SKPRAKSGARKSPKKK

SEQ ID NO: 4340 - protein, 15 aa, Homo sapiens
SKQMQQIRMSLRGKA

SEQ ID NO: 4341 - protein, 15 aa, Homo sapiens
SPSAKDIKKILDSVG

SEQ ID NO: 4342 - protein, 6 aa, Gallus gallus
SSRQSI

SEQ ID NO: 4343 - protein, 31 aa, Gallus gallus; identical to SEQ ID NO: 3227

SEQ ID NO: 4344 - protein, 8 aa, Homo sapiens
TFKAFDKH

SEQ ID NO: 4345 - protein, 8 aa, Homo sapiens
TPPPGIMA

SEQ ID NO: 4346 - protein, 15 aa, Homo sapiens
TTAAPAAAAAPAKVE

SEQ ID NO: 4347 - protein, 15 aa, Homo sapiens
TVASVPHSIINGYKR

SEQ ID NO: 4348 - protein, 15 aa, Homo sapiens
VKAFLADPSAFVAAA

SEQ ID NO: 4349 - protein, 15 aa, Homo sapiens
VLMGKNTMMRKAIRG

SEQ ID NO: 4350 - protein, 15 aa, Homo sapiens
VNVEPFWPGLFAKAL

SEQ ID NO: 4351 - protein, 8 aa, Homo sapiens
VRGVGGPS

SEQ ID NO: 4352 - protein, 15 aa, Homo sapiens
VSAAPGSAAPAAGSA

SEQ ID NO: 4353 - protein, 16 aa, Homo sapiens
VSELITKAVAASKERS

SEQ ID NO: 4354 - protein, 15 aa, Homo sapiens
VTVTEDKINALIKAA

SEQ ID NO: 4355 - protein, 8 aa, Homo sapiens
YRKKMDIP

SEQ ID NO: 4356 - protein, 14 aa, Homo sapiens
FKEQFLDGDGWTSR

SEQ ID NO: 4357 - protein, 345 aa, Homo sapiens
MISPVLILFSSFLCHVAIAGRTCPKPDDLPFSTVVPLKTFYEPGEEITYSCKPGYVSRGGMRKFICPLTGLWPINTLKCTPRVCPFAGILENGAVRYTTFEYPNTISFSCNTGFYLNGADSAKCTEEGKWSPELPVCAPIICPPPSIPTFATLRVYKPSAGNNSLYRDTAVFECLPQHAMFGNDTITCTTHGNWTKLPECREVKCPFPSRPDNGFVNYPAKPTLYYKDKATFGCHDGYSLDGPEEIECTKLGNWSAMPSCKASCKLPVKKATVVYQGERVKIQEKFKNGMLHGDKVSFFCKNKEKKCSYTEDAQCIDGTIEVPKCFKEHSSLAFWKTDASDVKPC

SEQ ID NO: 4358 - protein, 7 aa, Homo sapiens
APSVTLF

SEQ ID NO: 4359 - protein, 7 aa, Homo sapiens
ATLVCLI

SEQ ID NO: 4360 - protein, 7 aa, Homo sapiens
AWHQQQP

SEQ ID NO: 4361 - protein, 7 aa, Homo sapiens
ERGLRYL

SEQ ID NO: 4362 - protein, 7 aa, Homo sapiens
ERILTIS

SEQ ID NO: 4363 - protein, 7 aa, Homo sapiens
GASVKVT

SEQ ID NO: 4364 - protein, 7 aa, Homo sapiens
GAVTVAW

SEQ ID NO: 4365 - protein, 7 aa, Homo sapiens
GSHTRGD

SEQ ID NO: 4366 - protein, 20 aa, Homo sapiens
IRGNRIRYFILPDSLPLDTI

SEQ ID NO: 4367 - protein, 7 aa, Homo sapiens
LMKINSD

SEQ ID NO: 4368 - protein, 19 aa, Homo sapiens
MKLVRFLMKLSHETVTIEL

SEQ ID NO: 4369 - protein, 7 aa, Homo sapiens
PDRFSGS

SEQ ID NO: 4370 - protein, 20 aa, Homo sapiens
PLDTIRVDVEPKVKSKKREA

SEQ ID NO: 4371 - protein, 7 aa, Homo sapiens
RGYDSYA

SEQ ID NO: 4372 - protein, 7 aa, Homo sapiens
SYLSLTP

SEQ ID NO: 4373 - protein, 7 aa, Homo sapiens
SYSCQVT

SEQ ID NO: 4374 - protein, 20 aa, Homo sapiens
TGVDVSMNTHLKAVKMTLKN

SEQ ID NO: 4375 - protein, 20 aa, Homo sapiens
VTIELKNGTQVHGTITGVDV

SEQ ID NO: 4376 - protein, 7 aa, Homo sapiens
WKAPSSP

SEQ ID NO: 4377 - protein, 7 aa, Homo sapiens
YAASSYL

SEQ ID NO: 4378 - protein, 7 aa, Homo sapiens
YCQTWGS

SEQ ID NO: 4379 - protein, 7 aa, Homo sapiens
YDSYAIA

SEQ ID NO: 4380 - protein, 8 aa, Homo sapiens
EVFISAPR

SEQ ID NO: 4381 - protein, 10 aa, Mus musculus
PAKSAPAPKK

SEQ ID NO: 4382 - protein, 30 aa, Mus musculus
PEPAKSAPAPKKGSKKAVTKAQKKDGKKRK

SEQ ID NO: 4383 - protein, 21 aa, Human alphaherpesvirus sp.
PPPPSSPTHDPPDSDPQIPPP

SEQ ID NO: 4384 - protein, 8 aa, Homo sapiens
PQIVPEPM

SEQ ID NO: 4385 - protein, 21 aa, Homo sapiens
PTRAPSGPRPPSRSQAQTPPR

SEQ ID NO: 4386 - protein, 10 aa, Homo sapiens
DGPPGELGPD

SEQ ID NO: 4387 - protein, 10 aa, Homo sapiens
DKERERRRSR

SEQ ID NO: 4388 - protein, 10 aa, Homo sapiens
EKIERRQQEV

SEQ ID NO: 4389 - protein, 10 aa, Homo sapiens
ENGYLMEAAP

SEQ ID NO: 4390 - protein, 10 aa, Homo sapiens
ERDKERERRR

SEQ ID NO: 4391 - protein, 10 aa, Homo sapiens
ERPGPSPLPH

SEQ ID NO: 4392 - protein, 10 aa, Homo sapiens
ERSRERDKER

SEQ ID NO: 4393 - protein, 10 aa, Homo sapiens
GERGSERGRD

SEQ ID NO: 4394 - protein, 10 aa, Homo sapiens
GGGLGGTRRG

SEQ ID NO: 4395 - protein, 10 aa, Homo sapiens
IERRQQEVET

SEQ ID NO: 4396 - protein, 10 aa, Homo sapiens
KEERRRSRER

SEQ ID NO: 4397 - protein, 8 aa, Homo sapiens
KMKGTFVE

SEQ ID NO: 4398 - protein, 10 aa, Homo sapiens
KRGERGSERG

SEQ ID NO: 4399 - protein, 10 aa, Homo sapiens
MERKRREKIE

SEQ ID NO: 4400 - protein, 10 aa, Homo sapiens
MMPVGPAPGM

SEQ ID NO: 4401 - protein, 10 aa, Homo sapiens
MTQFLPPNLL

SEQ ID NO: 4402 - protein, 10 aa, Homo sapiens
PGMMPVGPAP

SEQ ID NO: 4403 - protein, 10 aa, Homo sapiens
PGPSPLPHRD

SEQ ID NO: 4404 - protein, 10 aa, Homo sapiens
PPGELGPDGP

SEQ ID NO: 4405 - protein, 10 aa, Homo sapiens
PPPGMMPVGP

SEQ ID NO: 4406 - protein, 10 aa, Homo sapiens
PRRLGGGLGG

SEQ ID NO: 4407 - protein, 10 aa, Homo sapiens
PSPLPHRDRD

SEQ ID NO: 4408 - protein, 10 aa, Homo sapiens
REERMERKRR

SEQ ID NO: 4409 - protein, 10 aa, Homo sapiens
RERERRERSR

SEQ ID NO: 4410 - protein, 10 aa, Homo sapiens
RERRERSRER

SEQ ID NO: 4411 - protein, 10 aa, Homo sapiens
RKRREKIERR

SEQ ID NO: 4412 - protein, 10 aa, Homo sapiens
RLGGGLGGTR

SEQ ID NO: 4413 - protein, 10 aa, Homo sapiens
RREKIERRQQ

SEQ ID NO: 4414 - protein, 10 aa, Homo sapiens
RRERSRERDK

SEQ ID NO: 4415 - protein, 10 aa, Homo sapiens
SRERDKERER

SEQ ID NO: 4416 - protein, 10 aa, Homo sapiens
SRYDERPGPS

SEQ ID NO: 4417 - protein, 10 aa, Homo sapiens
YDERPGPSPL

SEQ ID NO: 4418 - protein, 21 aa, Mus musculus
STDHPKYSDMIVAAIQAEKNR

SEQ ID NO: 4419 - protein, 13 aa, Homo sapiens
AEVETDKATVGFE

SEQ ID NO: 4420 - protein, 21 aa, Homo sapiens
GPPPPGMMPVGPAPGMRPPMG

SEQ ID NO: 4421 - protein, 18 aa, Homo sapiens
VGPAPGMRPPMGGHMPMM

SEQ ID NO: 4422 - protein, 14 aa, Gallus gallus
DWMEEEEGAQREKE

SEQ ID NO: 4423 - protein, 8 aa, Homo sapiens
GTLHVVQR

SEQ ID NO: 4424 - protein, 8 aa, Homo sapiens
IIWRSTQG

SEQ ID NO: 4425 - protein, 8 aa, Homo sapiens
IWRSTQGV

SEQ ID NO: 4426 - protein, 8 aa, Homo sapiens
LGTLHVVQ

SEQ ID NO: 4427 - protein, 8 aa, Homo sapiens
RIIWRSTQ

SEQ ID NO: 4428 - protein, 8 aa, Homo sapiens
RVRVSWSP

SEQ ID NO: 4429 - protein, 8 aa, Homo sapiens
RVSWSPVP

SEQ ID NO: 4430 - protein, 21 aa, Gallus gallus
SASHPTYSEMIAAAIRAEKSR

SEQ ID NO: 4431 - protein, 14 aa, Gallus gallus
SQKEEEEGAQREKE

SEQ ID NO: 4432 - protein, 8 aa, Homo sapiens
TLHVVQRG

SEQ ID NO: 4433 - protein, 8 aa, Homo sapiens
VPRAQGFL

SEQ ID NO: 4434 - protein, 8 aa, Homo sapiens
VRVSWSPV

SEQ ID NO: 4435 - protein, 21 aa, Homo sapiens
ECLPQHAMFGNDTITCTTHGN

SEQ ID NO: 4436 - protein, 15 aa, Homo sapiens
KLPVKKATVVYQGER

SEQ ID NO: 4437 - protein, 16 aa, Homo sapiens
LPVKKATVVYQGERVK

SEQ ID NO: 4438 - protein, 14 aa, Homo sapiens
PVKKATVVYQGERV

SEQ ID NO: 4439 - protein, 17 aa, unidentified
  REGION 1..17: note = epitope involved in systemic lupus
APVCVWERLSPYRERCV

SEQ ID NO: 4440 - protein, 17 aa, unidentified
  REGION 1..17: note = epitope involved in systemic lupus
APVCVWERLSPYRERCV

SEQ ID NO: 4441 - protein, 21 aa, unidentified
  REGION 1..21: note = epitope involved in systemic lupus
APVCVWERLSPYRERCVPAEG

SEQ ID NO: 4442 - protein, 18 aa, unidentified
  REGION 1..18: note = epitope involved in systemic lupus
CHWDPFSLSAYFPGGGSC

SEQ ID NO: 4443 - protein, 12 aa, unidentified
  REGION 1..12: note = epitope involved in systemic lupus
HWDPFSLSAYFP

SEQ ID NO: 4444 - protein, 12 aa, unidentified
  REGION 1..12: note = epitope involved in systemic lupus
HWDPFSLSAYFP

SEQ ID NO: 4445 - protein, 16 aa, unidentified
  REGION 1..16: note = epitope involved in systemic lupus
HWDPFSLSAYFPGGGS

SEQ ID NO: 4446 - protein, 22 aa, Mus musculus
SGRGKGGKGLGKGGAKRHRKVL

SEQ ID NO: 4447 - protein, 22 aa, Mus musculus
SGRGKGGKGLGKGGAKRHRKVL

SEQ ID NO: 4448 - protein, 5 aa, unidentified
  REGION 1..5: note = epitope involved in systemic lupus
DWEYS

SEQ ID NO: 4449 - protein, 10 aa, unidentified
  REGION 1..10: note = epitope involved in systemic lupus
DWEYSVWSLN

SEQ ID NO: 4450 - protein, 18 aa, Mus musculus
LPDPYQKQCDDFVAEYEP

SEQ ID NO: 4451 - protein, 21 aa, Mus musculus
KEGYKVRLDLNITLEFRTTSK

SEQ ID NO: 4452 - protein, 15 aa, Homo sapiens
PPGMRPPMGPMGIPP

SEQ ID NO: 4453 - protein, 9 aa, Burkholderia fungorum
RAGTDEGFG

SEQ ID NO: 4454 - protein, 17 aa, Mus musculus
DGKWHTVKTEYIKRKAF

SEQ ID NO: 4455 - protein, 12 aa, Homo sapiens
GARGLTGRPGDA

SEQ ID NO: 4456 - protein, 12 aa, Homo sapiens
GARGLTGRPGDA

SEQ ID NO: 4457 - protein, 19 aa, Mus musculus
GRLHFMFDLGKGRTKVSHP

SEQ ID NO: 4458 - protein, 17 aa, Mus musculus
KATPMLKMRTSFHGCIK

SEQ ID NO: 4459 - protein, 21 aa, Mus musculus
KNLEISRSTFDLLRNSYGVRK

SEQ ID NO: 4460 - protein, 22 aa, Mus musculus
KQNCLSSRASFRGCVRNLRLSR

SEQ ID NO: 4461 - protein, 22 aa, Mus musculus
RPVRHAQCRVCDGNSTNPRERH

SEQ ID NO: 4462 - protein, 19 aa, Mus musculus
TSLRKALLHAPTGSYSDGQ

SEQ ID NO: 4463 - protein, 15 aa, unidentified
  REGION 1..15: note = epitope involved in systemic lupus
DHRSPPWLTSLLTIS

SEQ ID NO: 4464 - protein, 15 aa, unidentified
  REGION 1..15: note = epitope involved in systemic lupus
DTWPTARLTSSMQYI

SEQ ID NO: 4465 - protein, 15 aa, unidentified
  REGION 1..15: note = epitope involved in systemic lupus
GHRYTSSVSLTEACP

SEQ ID NO: 4466 - protein, 15 aa, unidentified
  REGION 1..15: note = epitope involved in systemic lupus
HTYTSHLRYVPPISL

SEQ ID NO: 4467 - protein, 15 aa, unidentified
  REGION 1..15: note = epitope involved in systemic lupus
KLTSSLRCNCPPLRF

SEQ ID NO: 4468 - protein, 15 aa, unidentified
  REGION 1..15: note = epitope involved in systemic lupus
KLTSSLRYNSPPLCF

SEQ ID NO: 4469 - protein, 15 aa, unidentified
  REGION 1..15: note = epitope involved in systemic lupus
KSTSSLRDNSPPVCF

SEQ ID NO: 4470 - protein, 15 aa, unidentified
  REGION 1..15: note = epitope involved in systemic lupus
QAPRLMSSLSYFPQS

SEQ ID NO: 4471 - protein, 15 aa, unidentified
  REGION 1..15: note = epitope involved in systemic lupus
RDGQRLTSSKTMLPY

SEQ ID NO: 4472 - protein, 10 aa, unidentified
  REGION 1..10: note = epitope involved in systemic lupus
RLTSSLRYNP

SEQ ID NO: 4473 - protein, 15 aa, unidentified
  REGION 1..15: note = epitope involved in systemic lupus
RRTPDPAVSPWQLTY

SEQ ID NO: 4474 - protein, 15 aa, unidentified
  REGION 1..15: note = epitope involved in systemic lupus
THDLSSRASSSLSYN

SEQ ID NO: 4475 - protein, 7 aa, Homo sapiens
ATVQLPQ

SEQ ID NO: 4476 - protein, 7 aa, Homo sapiens
QPHSRPY

SEQ ID NO: 4477 - protein, 15 aa, Homo sapiens
ASGFTFSNYAMHWVR

SEQ ID NO: 4478 - protein, 15 aa, Homo sapiens
GLEWVAVISYDGGNK

SEQ ID NO: 4479 - protein, 15 aa, Homo sapiens
KYYADSVKGRFTISR

SEQ ID NO: 4480 - protein, 14 aa, Homo sapiens
MHWVRQAPGKGLEW

SEQ ID NO: 4481 - protein, 14 aa, Homo sapiens
MYWVRQAPGKGLEW

SEQ ID NO: 4482 - protein, 15 aa, Homo sapiens
QAPGKGLEWVAVISY

SEQ ID NO: 4483 - protein, 15 aa, Homo sapiens
VAVISYDGGNKYYAD

SEQ ID NO: 4484 - protein, 13 aa, Homo sapiens
ALREYRKKMDIPA

SEQ ID NO: 4485 - protein, 29 aa, Homo sapiens
GGPPMMPMMGPPPPGMMPVGPAPGMRPPM

SEQ ID NO: 4486 - protein, 31 aa, Homo sapiens
HKENVKDYYQKWMEEQAQSLIDKTTAAFQQG

SEQ ID NO: 4487 - protein, 8 aa, Homo sapiens
APPDDGPP

SEQ ID NO: 4488 - protein, 8 aa, Homo sapiens
CETNTGEV

SEQ ID NO: 4489 - protein, 8 aa, Homo sapiens
EEEEDGEM

SEQ ID NO: 4490 - protein, 8 aa, Homo sapiens
EELQKREE

SEQ ID NO: 4491 - protein, 8 aa, Homo sapiens
EIHSKTKS

SEQ ID NO: 4492 - protein, 8 aa, Homo sapiens
NTEEYIDG

SEQ ID NO: 4493 - protein, 8 aa, Homo sapiens
PDGPDGPE

SEQ ID NO: 4494 - protein, 8 aa, Homo sapiens
WSKAHPPE

SEQ ID NO: 4495 - protein, 24 aa, Homo sapiens
FCPDVEFKRRFKEAFSKAAQQTKG

SEQ ID NO: 4496 - protein, 26 aa, Homo sapiens
FGHISGGHINPAVTVAMVCTRKISIA

SEQ ID NO: 4497 - protein, 22 aa, Homo sapiens
MSDRPTARRWGKCGPLCTRENI

SEQ ID NO: 4498 - protein, 6 aa, Homo sapiens
PPPGIR

SEQ ID NO: 4499 - protein, 6 aa, Homo sapiens
PPPGMR

SEQ ID NO: 4500 - protein, 4 aa, Homo sapiens
PQGR

SEQ ID NO: 4501 - protein, 18 aa, Homo sapiens
PESFDGDPASNTAPLQPE

SEQ ID NO: 4502 - protein, 17 aa, Homo sapiens
KIHAREIFDSRGNPTVE

SEQ ID NO: 4503 - protein, 8 aa, Homo sapiens
PDDLPFST

SEQ ID NO: 4504 - protein, 13 aa, Homo sapiens
GRPGRRGRPGLKG

SEQ ID NO: 4505 - protein, 13 aa, Homo sapiens
PGKVGPKGPMGPK

SEQ ID NO: 4506 - protein, 13 aa, Homo sapiens
YNQYSQRYHQRTN

SEQ ID NO: 4507 - protein, 15 aa, Homo sapiens
ADSASSSESERNITI

SEQ ID NO: 4508 - protein, 15 aa, Homo sapiens
AKATKDVERNLSRDL

SEQ ID NO: 4509 - protein, 15 aa, Homo sapiens
DDKKKKEAAQKKATE

SEQ ID NO: 4510 - protein, 15 aa, Homo sapiens
DGLRNSTGLGSQNKF

SEQ ID NO: 4511 - protein, 15 aa, Homo sapiens
DVERNLSRDLVQEEE

SEQ ID NO: 4512 - protein, 15 aa, Homo sapiens
HYENSQRGPVSSTSD

SEQ ID NO: 4513 - protein, 15 aa, Homo sapiens
KEAAQKKATEQKIKV

SEQ ID NO: 4514 - protein, 15 aa, Homo sapiens
KKATEQKIKVPEQIK

SEQ ID NO: 4515 - protein, 15 aa, Homo sapiens
KKKKKDDKKKKEAAQ

SEQ ID NO: 4516 - protein, 15 aa, Homo sapiens
KNAVVSDLSEKEAWP

SEQ ID NO: 4517 - protein, 15 aa, Homo sapiens
KQLLKRGQHFPVIAA

SEQ ID NO: 4518 - protein, 15 aa, Homo sapiens
KRATANNQQPQQQQQ

SEQ ID NO: 4519 - protein, 15 aa, Homo sapiens
LSRDLVQEEEQLMEE

SEQ ID NO: 4520 - protein, 15 aa, Homo sapiens
MRELEAKATKDVERN

SEQ ID NO: 4521 - protein, 15 aa, Homo sapiens
NLGSAVKVLNSQSES

SEQ ID NO: 4522 - protein, 15 aa, Homo sapiens
NNQQPQQQQQQQQPQ

SEQ ID NO: 4523 - protein, 15 aa, Homo sapiens
NSKNQSDINHSTSGS

SEQ ID NO: 4524 - protein, 15 aa, Homo sapiens
PQALPRYPREVPPRF

SEQ ID NO: 4525 - protein, 15 aa, Homo sapiens
PVIAANLGSAVKVLN

SEQ ID NO: 4526 - protein, 15 aa, Homo sapiens
QKIKVPEQIKPSVSQ

SEQ ID NO: 4527 - protein, 15 aa, Homo sapiens
QLMEEKKKKKDDKKK

SEQ ID NO: 4528 - protein, 15 aa, Homo sapiens
QPQQQPQALPRYPRE

SEQ ID NO: 4529 - protein, 15 aa, Homo sapiens
QPQQQQPQQQPQALP

SEQ ID NO: 4530 - protein, 15 aa, Homo sapiens
QQPQPQPQQQQPQQQ

SEQ ID NO: 4531 - protein, 15 aa, Homo sapiens
QQQPQQQPQPQPQQQ

SEQ ID NO: 4532 - protein, 15 aa, Homo sapiens
QQQPQQQQPQQQPQP

SEQ ID NO: 4533 - protein, 15 aa, Homo sapiens
QQQQQQQQPQQQQPQ

SEQ ID NO: 4534 - protein, 15 aa, Homo sapiens
QRGPVSSTSDSSTNC

SEQ ID NO: 4535 - protein, 15 aa, Homo sapiens
RHQEHKQLLKRGQHF

SEQ ID NO: 4536 - protein, 15 aa, Homo sapiens
RNITIMASGNTGGEK

SEQ ID NO: 4537 - protein, 15 aa, Homo sapiens
RYPREVPPRFRHQEH

SEQ ID NO: 4538 - protein, 15 aa, Homo sapiens
SALTNQQPQNNGEVQ

SEQ ID NO: 4539 - protein, 15 aa, Homo sapiens
SDINHSTSGSHYENS

SEQ ID NO: 4540 - protein, 15 aa, Homo sapiens
SNNGTSTATSTNNNA

SEQ ID NO: 4541 - protein, 15 aa, Homo sapiens
SSTSDSSTNCKNAVV

SEQ ID NO: 4542 - protein, 15 aa, Homo sapiens
STATSTNNNAKRATA

SEQ ID NO: 4543 - protein, 15 aa, Homo sapiens
STGLGSQNKFVVGSS

SEQ ID NO: 4544 - protein, 15 aa, Homo sapiens
TNNNAKRATANNQQP

SEQ ID NO: 4545 - protein, 15 aa, Homo sapiens
VKVLNSQSESSALTN

SEQ ID NO: 4546 - protein, 15 aa, Homo sapiens
VPPRFRHQEHKQLLK

SEQ ID NO: 4547 - protein, 15 aa, Homo sapiens
VQEEEQLMEEKKKKK

SEQ ID NO: 4548 - protein, 15 aa, Homo sapiens
KLTSEARGRIPVAQK

SEQ ID NO: 4549 - protein, 19 aa, Homo sapiens
ALMRGKSTEEARKELQAAG

SEQ ID NO: 4550 - protein, 19 aa, Homo sapiens
ASTNGLINFIKQQREARVQ

SEQ ID NO: 4551 - protein, 19 aa, Homo sapiens
EDLERLLPHKVFEGNRPTN

SEQ ID NO: 4552 - protein, 19 aa, Homo sapiens
FEFWDWVGGRYSLWSAIGL

SEQ ID NO: 4553 - protein, 19 aa, Homo sapiens
NYTEGRAVLHVALRNRSNT

SEQ ID NO: 4554 - protein, 19 aa, Homo sapiens
SFCQRVRSGDWKGYTGKTI

SEQ ID NO: 4555 - protein, 21 aa, Homo sapiens
YLASASTMDHARHGFLPRRHR

SEQ ID NO: 4556 - protein, 5 aa, Homo sapiens
PAPKK

SEQ ID NO: 4557 - protein, 5 aa, Homo sapiens
PAPKK

SEQ ID NO: 4558 - protein, 7 aa, Homo sapiens
PAPKKGS

SEQ ID NO: 4559 - protein, 8 aa, Homo sapiens
PAPKKGSK

SEQ ID NO: 4560 - protein, 9 aa, Homo sapiens
PAPKKGSKK

SEQ ID NO: 4561 - protein, 5 aa, Homo sapiens
PEPAK

SEQ ID NO: 4562 - protein, 21 aa, Homo sapiens
PEPAKSAPAPKKGSKKAVTKA

SEQ ID NO: 4563 - protein, 21 aa, Homo sapiens
PEPAKSAPAPKKGSKKAVTKA

SEQ ID NO: 4564 - protein, 21 aa, Homo sapiens
PEPAKSAPAPKKGSKKAVTKA

SEQ ID NO: 4565 - protein, 9 aa, Mus musculus
KTEKDPESE

SEQ ID NO: 4566 - protein, 12 aa, Bos taurus
AAGAVMRGFVFT

SEQ ID NO: 4567 - protein, 13 aa, Homo sapiens
IPSTVKAGELEKI

SEQ ID NO: 4568 - protein, 12 aa, Homo sapiens
ISRCQVCMKKRH

SEQ ID NO: 4569 - protein, 5 aa, Homo sapiens
MKKRH

SEQ ID NO: 4570 - protein, 11 aa, Homo sapiens
SLNPERMFRKP

SEQ ID NO: 4571 - protein, 36 aa, Homo sapiens
SLNPERMFRKPIPSTVKAGELEKIISRCQVCMKKRH

SEQ ID NO: 4572 - protein, 15 aa, Homo sapiens
TAIPSCPEGTVPLYS

SEQ ID NO: 4573 - protein, 9 aa, Homo sapiens
ISLWKGFSF

SEQ ID NO: 4574 - protein, 15 aa, Homo sapiens
TDIPPCPHGWISLWK

SEQ ID NO: 4575 - protein, 20 aa, Bos taurus
CNFASRNDYSYWLSTPEPMP

SEQ ID NO: 4576 - protein, 9 aa, Homo sapiens
GSPATWTTR

SEQ ID NO: 4577 - protein, 239 aa, Homo sapiens
RGDSGSPATWTTRGFVFTRHSQTTAIPSCPEGTVPLYSGFSFLFVQGNQRAHGQDLGTLGSCLQRFTTMPFLFCNVNDVCNFASRNDYSYWLSTPALMPMNMAPITGRALEPYISRCTVCEGPAIAIAVHSQTTDIPPCPHGWISLWKGFSFIMFTSAGSEGTGQALASPGSCLEEFRASPFLECHGRGTCNYYSNSYSFWLASLNPERMFRKPIPSTVKAGELEKIISRCQVCMKKRH

SEQ ID NO: 4578 - protein, 15 aa, Bos taurus
CFEGQEKAHNQDLGL

SEQ ID NO: 4579 - protein, 15 aa, Bos taurus
CHGRGTCNYYANAYS

SEQ ID NO: 4580 - protein, 19 aa, Bos taurus
CNYYSNSYSFWLASLDPKR

SEQ ID NO: 4581 - protein, 13 aa, Bos taurus
CPAGWISLWKGFS

SEQ ID NO: 4582 - protein, 23 aa, Bos taurus
CTIERSEMFKPTPSTLKAGELRT

SEQ ID NO: 4583 - protein, 14 aa, Bos taurus
CYYASRNDKSYWLS

SEQ ID NO: 4584 - protein, 18 aa, Bos taurus
DVCNFASRNDYSYWLSTP

SEQ ID NO: 4585 - protein, 6 aa, Bos taurus
GLGFYG

SEQ ID NO: 4586 - protein, 18 aa, Homo sapiens
KFDVPCGGRDCSGGCQCY

SEQ ID NO: 4587 - protein, 14 aa, Bos taurus
LEPYISRCTVCEGP

SEQ ID NO: 4588 - protein, 13 aa, Bos taurus
PYALGKEERDRYR

SEQ ID NO: 4589 - protein, 20 aa, Homo sapiens
AIAVHSQTTDIPPCPHGWIS

SEQ ID NO: 4590 - protein, 20 aa, Homo sapiens
ALASPGSCLEEFRASPFLEC

SEQ ID NO: 4591 - protein, 20 aa, Homo sapiens
ALMPMNMAPITGRALEPYIS

SEQ ID NO: 4592 - protein, 20 aa, Homo sapiens
EFRASPFLECHGRGTCNYYS

SEQ ID NO: 4593 - protein, 20 aa, Homo sapiens
FTTMPFLFCNVNDVCNFASR

SEQ ID NO: 4594 - protein, 20 aa, Homo sapiens
HGRGTCNYYSNSYSFWLASL

SEQ ID NO: 4595 - protein, 20 aa, Homo sapiens
IPPCPHGWISLWKGFSFIMF

SEQ ID NO: 4596 - protein, 20 aa, Homo sapiens
IPSCPEGTVPLYSGFSFLFV

SEQ ID NO: 4597 - protein, 14 aa, Homo sapiens
KIISRCQVCMKKRH

SEQ ID NO: 4598 - protein, 20 aa, Homo sapiens
LGTLGSCLQRFTTMPFLFCN

SEQ ID NO: 4599 - protein, 20 aa, Homo sapiens
LWKGFSFIMFTSAGSEGTGQ

SEQ ID NO: 4600 - protein, 20 aa, Homo sapiens
LYSGFSFLFVQGNQRAHGQD

SEQ ID NO: 4601 - protein, 20 aa, Homo sapiens
NDYSYWLSIPALMPMNMAPI

SEQ ID NO: 4602 - protein, 20 aa, Homo sapiens
NSYSFWLASLNPERMFRKPI

SEQ ID NO: 4603 - protein, 20 aa, Homo sapiens
PSTVKAGELEKIISRCQVCM

SEQ ID NO: 4604 - protein, 20 aa, Homo sapiens
RCTVCEGPAIAIAVHSQTTD

SEQ ID NO: 4605 - protein, 20 aa, Homo sapiens
SPATWTTRGFVFTRHSQTTA

SEQ ID NO: 4606 - protein, 20 aa, Homo sapiens
TGRALEPYISRCTVCEGPAI

SEQ ID NO: 4607 - protein, 20 aa, Homo sapiens
TSAGSEGTGQALASPGSCLE

SEQ ID NO: 4608 - protein, 21 aa, Homo sapiens
VFTRHSQTTAIPSCPEGTVPL

SEQ ID NO: 4609 - protein, 21 aa, Homo sapiens
VNDVCNFASRNDYSYWLSTPA

SEQ ID NO: 4610 - protein, 44 aa, Homo sapiens
PGLKGKRGDSGSPATWTTRGFVFTRHSQTTAIPSCPEGTVPLYS

SEQ ID NO: 4611 - protein, 1670 aa, Homo sapiens
MSARTAPRPQVLLLPLLLVLLAAAPAASKGCVCKDKGQCFCDGAKGEKGEKGFPGPPGSPGQKGFTGPEGLPGPQGPKGFPGLPGLTGSKGVRGISGLPGFSGSPGLPGTPGNTGPYGLVGVPGCSGSKGEQGFPGLPGTPGYPGIPGAAGLKGQKGAPAKEEDIELDAKGDPGLPGAPGPQGLPGPPGFPGPVGPPGPPGFFGFPGAMGPRGPKGHMGERVIGHKGERGVKGLTGPPGPPGTVIVTLTGPDNRTDLKGEKGDKGAMGEPGPPGPSGLPGESYGSEKGAPGDPGLQGKPGKDGVPGFPGSEGVKGNRGFPGLMGEYGIKGQKGDIGPPGFRGPTEYYDTYQEKGDEGTPGPPGPRGARGPQGPSGPPGVPGSPGSSRPGLRGAPGWPGLKGSKGERGRPGKDAMGTPGSPGCAGSPGLPGSPGPPGPPGDIVFRKGPPGDHGLPGYLGSPGIPGVDGPKGEPGLLCTQCPYIPGPPGLPGLPGLHGVKGIPGRQGAAGLKGSPGSPGNTGLPGFPGFPGAQGDPGLKGEKGETLQPEGQVGVPGDPGLRGQPGRKGLDGIPGTPGVKGLPGPKGELALSGEKGDQGPPGDPGSPGSPGPAGPAGPPGYGPQGEPGLQGTQGVPGAPGPPGEAGPRGELSVSTPVPGPPGPPGPPGHPGPQGPPGIPGSLGKCGDPGLPGPDGEPGIPGIGFPGPPGPKGDQGFPGTKGSLGCPGKMGEPGLPGKPGLPGAKGEPAVAMPGGPGTPGFPGERGNSGEHGEIGLPGLPGLPGTPGNEGLDGPRGDPGQPGPPGEQGPPGRCIEGPRGAQGLPGLNGLKGQQGRRGKTGPKGDPGIPGLDRSGFPGETGSPGIPGHQGEMGPLGQRGYPGNPGILGPPGEDGVIGMMGFPGAIGPPGPPGNPGRPGQRGSPGIPGVKGQRGTPGAKGEQGDKGNPGPSEISHVIGDKGEPGLKGFAGNPGEKGNRGVPGMPGLKGLKGLPGPAGPPGPRGDLGSTGNPGEPGLRGIPGSMGNMGMPGSKGKRGTLGFPGRAGRPGLPGIHGLQGDKGEPGYSEGTRPGPPGPTGDPGLPGDMGKKGEMGQPGPPGHLGPAGPEGAPGSPGSPGLPGKPGPHGDLGFKGIKGLLGPPGIRGPPGLPGFPGSPGPMGIRGDQGRDGIPGPAGEKGETGLLRAPPGPRGNPGAQGAKGDRGAPGFPGLPGRKGAMGDAGPRGPTGIEGFPGPPGLPGAIIPGQTGNRGPPGSRGSPGAPGPPGPPGSHVIGIKGDKGSMGHPGPKGPPGTAGDMGPPGRLGAPGTPGLPGPRGDPGFQGFPGVKGEKGNPGFLGSIGPPGPIGPKGPPGVRGDPGTLKIISLPGSPGPPGTPGEPGMQGEPGPPGPPGNLGPCGPRGKPGKDGKPGTPGPAGEKGNKGSKGEPGPAGSDGLPGLKGKRGDSGSPATWTTRGFVFTRHSQTTAIPSCPEGTVPLYSGFSFLFVQGNQRAHGQDLGTLGSCLQRFTTMPFLFCNVNDVCNFASRNDYSYWLSTPALMPMNMAPITGRALEPYISRCTVCEGPAIAIAVHSQTTDIPPCPHGWISLWKGFSFIMFTSAGSEGTGQALASPGSCLEEFRASPFLECHGRGTCNYYSNSYSFWLASLNPERMFRKPIPSTVKAGELEKIISRCQVCMKKRH

SEQ ID NO: 4612 - protein, 20 aa, Mus musculus
CPQDWVSLWKGFSFIMFTSA

SEQ ID NO: 4613 - protein, 11 aa, Mus musculus
DWVSLWKGFSF

SEQ ID NO: 4614 - protein, 16 aa, Mycobacterium tuberculosis
DLSLLGKARKVVVTKD

SEQ ID NO: 4615 - protein, 15 aa, Mycobacterium bovis
NPLGLKRGIEKAVEK

SEQ ID NO: 4616 - protein, 16 aa, Homo sapiens
QPHDLGKVGEVIVTKD

SEQ ID NO: 4617 - protein, 13 aa, Human alphaherpesvirus sp.
SYLKDSDFLDAAL

SEQ ID NO: 4618 - protein, 13 aa, Homo sapiens
SYLQDSDPDSFQD

SEQ ID NO: 4619 - protein, 14 aa, Homo sapiens
ALNEDLRSWTAADT

SEQ ID NO: 4620 - protein, 14 aa, Homo sapiens
ALNEDLSSWTAADT

SEQ ID NO: 4621 - protein, 15 aa, Homo sapiens
NPVEIRRGVMLAVDA

SEQ ID NO: 4622 - protein, 25 aa, Homo sapiens
QVSGPERTIPITREEKPAVTAAPKK

SEQ ID NO: 4623 - protein, 14 aa, Homo sapiens
DLYILMSHTSGSAA

SEQ ID NO: 4624 - protein, 14 aa, Homo sapiens
FLGELTSSEVATEV

SEQ ID NO: 4625 - protein, 14 aa, Homo sapiens
GVYLLTSHRTATAA

SEQ ID NO: 4626 - protein, 16 aa, Homo sapiens
KSMVILTSTVTAGTAE

SEQ ID NO: 4627 - protein, 12 aa, Bos taurus
NNRERRGIALDG

SEQ ID NO: 4628 - protein, 15 aa, Bos taurus
ADGSSWEGVGVVPDV

SEQ ID NO: 4629 - protein, 20 aa, Homo sapiens
GPTHLFQPSLVLDMAKVLLD

SEQ ID NO: 4630 - protein, 20 aa, Homo sapiens
SGIPYIISYLHPGNTILHVD

SEQ ID NO: 4631 - protein, 20 aa, Homo sapiens
ASSTIIKEGIDRTVLGILVS

SEQ ID NO: 4632 - protein, 13 aa, Homo sapiens
DTNLASSTIIKEG

SEQ ID NO: 4633 - protein, 20 aa, Homo sapiens
GFLGELTSSEVATEVPFRLM

SEQ ID NO: 4634 - protein, 16 aa, Bos taurus
LPLLANNRERRGIALD

SEQ ID NO: 4635 - protein, 14 aa, Bos taurus
NLYLTIPTARSVGA

SEQ ID NO: 4636 - protein, 20 aa, Homo sapiens
NRERRGIALDGKIKHEDTNL

SEQ ID NO: 4637 - protein, 12 aa, Homo sapiens
PTARSVGAADGS

SEQ ID NO: 4638 - protein, 23 aa, Bos taurus
PTARSVGAADGSSWEGVGVVPDV

SEQ ID NO: 4639 - protein, 14 aa, Bos taurus
VGAADGSSWEGVGV

SEQ ID NO: 4640 - protein, 20 aa, Homo sapiens
YQIKVKLTVSGFLGELTSSE

SEQ ID NO: 4641 - protein, 20 aa, Homo sapiens
LLANNRERRGIALDGKIKHE

SEQ ID NO: 4642 - protein, 16 aa, Homo sapiens
NRERRGIALDGKIKHE

SEQ ID NO: 4643 - protein, 25 aa, Homo sapiens
DKFVIFLDVKHFSPEDLTVKVQDDF

SEQ ID NO: 4644 - protein, 25 aa, Homo sapiens
GLDATHAERAIPVSREEKPTSAPSS

SEQ ID NO: 4645 - protein, 25 aa, Homo sapiens
GMLTFCGPKIQTGLDATHAERAIPV

SEQ ID NO: 4646 - protein, 25 aa, Homo sapiens
LSSDGVLTVNGPRKQVSGPERTIPI

SEQ ID NO: 4647 - protein, 25 aa, Homo sapiens
PEELKVKVLGDVIEVHGKHEERQDE

SEQ ID NO: 4648 - protein, 25 aa, Homo sapiens
RLEKDRFSVNLDVKHFSPEELKVKV

SEQ ID NO: 4649 - protein, 25 aa, Homo sapiens
TVKVQDDFVEIHGKHNERQDDHGYI

SEQ ID NO: 4650 - protein, 14 aa, Mus musculus
QTWEGSGVLPCVGT

SEQ ID NO: 4651 - protein, 20 aa, Mus musculus
SYSSAVPLLCSYFFEAEPRQ

SEQ ID NO: 4652 - protein, 20 aa, unidentified
  REGION 1..20: note = epitope involved in autoimmune uvetisis
ENSDSDYDREALQERLAKLA

SEQ ID NO: 4653 - protein, 20 aa, Mycobacterium leprae
ENSDSDYDREKLQERLAKLA

SEQ ID NO: 4654 - protein, 15 aa, Homo sapiens
LSSVVVDPSIRHFDV

SEQ ID NO: 4655 - protein, 15 aa, Homo sapiens
DVGEYRAVTELGRPD

SEQ ID NO: 4656 - protein, 15 aa, Homo sapiens
DVGVYRAVTPQGRPD

SEQ ID NO: 4657 - protein, 14 aa, Homo sapiens
GNRIAQWQSFQLEG

SEQ ID NO: 4658 - protein, 15 aa, Homo sapiens
KVKKIYLDEKRLLAG

SEQ ID NO: 4659 - protein, 31 aa, Homo sapiens; identical to SEQ ID NO: 923

SEQ ID NO: 4660 - protein, 11 aa, Homo sapiens
VLSPADKTNVK

SEQ ID NO: 4661 - protein, 31 aa, Homo sapiens; identical to SEQ ID NO: 928

SEQ ID NO: 4662 - protein, 14 aa, Homo sapiens
VVAGVANALAHKYH

SEQ ID NO: 4663 - protein, 19 aa, Homo sapiens
GLPRLETPADLSTAIASRS

SEQ ID NO: 4664 - protein, 11 aa, Homo sapiens
HARLRDSGRAY

SEQ ID NO: 4665 - protein, 20 aa, Homo sapiens
CNESSMQSLRQRKSVNALNS

SEQ ID NO: 4666 - protein, 20 aa, Homo sapiens
FQDTHNNAHYYVFFEEQEDE

SEQ ID NO: 4667 - protein, 19 aa, Homo sapiens
GIFNTGLKMFPDLTKVYST

SEQ ID NO: 4668 - protein, 16 aa, Homo sapiens
GPSLLDVSQTSVTALP

SEQ ID NO: 4669 - protein, 19 aa, Homo sapiens
IQRIPSLPPSTQTLKLIET

SEQ ID NO: 4670 - protein, 19 aa, Homo sapiens
ITDNPYMTSIPVNAFQGLC

SEQ ID NO: 4671 - protein, 20 aa, Homo sapiens
KNPQEETLQAFDSHYDYTIC

SEQ ID NO: 4672 - protein, 20 aa, Homo sapiens
LTRADLSYPSHCCAFKNQKK

SEQ ID NO: 4673 - protein, 19 aa, Homo sapiens
PDALKELPLLKFLGIFNTG

SEQ ID NO: 4674 - protein, 20 aa, Homo sapiens
PPARALKRSLWVEVDLLIGS

SEQ ID NO: 4675 - protein, 20 aa, Homo sapiens
PYEFSRKVPTFATPWPDFVP

SEQ ID NO: 4676 - protein, 19 aa, Homo sapiens
TKVYSTDIFFILEITDNPY

SEQ ID NO: 4677 - protein, 20 aa, Homo sapiens
VNALNSPLHQEYEENLGDSI

SEQ ID NO: 4678 - protein, 20 aa, Homo sapiens
ASRSVADKILDLYKHPDNID

SEQ ID NO: 4679 - protein, 12 aa, Homo sapiens
DPLIRGLLARPA

SEQ ID NO: 4680 - protein, 18 aa, Homo sapiens
EPTSGVIARAAEIMETSI

SEQ ID NO: 4681 - protein, 19 aa, Homo sapiens
FQQYVGPYEGYDSTANPTV

SEQ ID NO: 4682 - protein, 20 aa, Homo sapiens
HGLPGYNEWREFCGLPRLET

SEQ ID NO: 4683 - protein, 20 aa, Homo sapiens
HPDNIDVWLGGLAENFLPRA

SEQ ID NO: 4684 - protein, 18 aa, Homo sapiens
HWSADAVYQEARKVVGAL

SEQ ID NO: 4685 - protein, 20 aa, Homo sapiens
IPGMMLEAWRETFPQDDKCG

SEQ ID NO: 4686 - protein, 20 aa, Homo sapiens
KFPEDFESCDSIPGMMLEAW

SEQ ID NO: 4687 - protein, 19 aa, Homo sapiens
KVVGALHQIITLRDYIPRI

SEQ ID NO: 4688 - protein, 20 aa, Homo sapiens
LIGKQMKALRDGDWFWWENS

SEQ ID NO: 4689 - protein, 20 aa, Homo sapiens
LPRLETPADLSTAIASRSVA

SEQ ID NO: 4690 - protein, 20 aa, Homo sapiens
NFLPRARTGPLFACLIGKQM

SEQ ID NO: 4691 - protein, 18 aa, Homo sapiens
NRLAAALKALNAHWSADA

SEQ ID NO: 4692 - protein, 18 aa, Homo sapiens
RDYIPRILGPEAFQQYVG

SEQ ID NO: 4693 - protein, 13 aa, Homo sapiens
RGLLARPAKLQVQ

SEQ ID NO: 4694 - protein, 18 aa, Homo sapiens
TAAFRFGHATIHPLVRRL

SEQ ID NO: 4695 - protein, 933 aa, Homo sapiens
MRALAVLSVTLVMACTEAFFPFISRGKELLWGKPEESRVSSVLEESKRLVDTAMYATMQRNLKKRGILSPAQLLSFSKLPEPTSGVIARAAEIMETSIQAMKRKVNLKTQQSQHPTDALSEDLLSIIANMSGCLPYMLPPKCPNTCLANKYRPITGACNNRDHPRWGASNTALARWLPPVYEDGFSQPRGWNPGFLYNGFPLPPVREVTRHVIQVSNEVVTDDDRYSDLLMAWGQYIDHDIAFTPQSTSKAAFGGGADCQMTCENQNPCFPIQLPEEARPAAGTACLPFYRSSAACGTGDQGALFGNLSTANPRQQMNGLTSFLDASTVYGSSPALERQLRNWTSAEGLLRVHARLRDSGRAYLPFVPPRAPAACAPEPGIPGETRGPCFLAGDGRASEVPSLTALHTLWLREHNRLAAALKALNAHWSADAVYQEARKVVGALHQIITLRDYIPRILGPEAFQQYVGPYEGYDSTANPTVSNVFSTAAFRFGHATIHPLVRRLDASFQEHPDLPGLWLHQAFFSPWTLLRGGGLDPLIRGLLARPAKLQVQDQLMNEELTERLFVLSNSSTLDLASINLQRGRDHGLPGYNEWREFCGLPRLETPADLSTAIASRSVADKILDLYKHPDNIDVWLGGLAENFLPRARTGPLFACLIGKQMKALRDGDWFWWENSHVFTDAQRRELEKHSLSRVICDNTGLTRVPMDAFQVGKFPEDFESCDSITGMNLEAWRETFPQDDKCGFPESVENGDFVHCEESGRRVLVYSCRHGYELQGREQLTCTQEGWDFQPPLCKDVNECADGAHPPCHASARCRNTKGGFQCLCADPYELGDDGRTCVDSGRLPRVTWISMSLAALLIGGFAGLTSTVICRWTRTGTKSTLPISETGGGTPELRCGKHQAVGTSPQRAAAQDSEQESAGMEGRDTHRLPRAL

SEQ ID NO: 4696 - protein, 26 aa, Homo sapiens
DNTGLTRVPMDAFQVGKFPEDFESCD

SEQ ID NO: 4697 - protein, 20 aa, Homo sapiens
DSHYDYTICGDSEDMVCTPK

SEQ ID NO: 4698 - protein, 20 aa, Homo sapiens
FQGLCNETLTLKLYNNGFTS

SEQ ID NO: 4699 - protein, 33 aa, Homo sapiens
GYNEWREFCGLPRLETPADLSTAIASRSVADKI

SEQ ID NO: 4700 - protein, 45 aa, Homo sapiens
INLQRGRDHGLPGYNEWREFCGLPRLETPADLSTAIASRSVADKI

SEQ ID NO: 4701 - protein, 20 aa, Homo sapiens
IRGILESLMCNESSMQSLRQ

SEQ ID NO: 4702 - protein, 20 aa, Homo sapiens
KLPLSLSFLHLTRADLSYPS

SEQ ID NO: 4703 - protein, 20 aa, Homo sapiens
LDAVYLNKNKYLTVIDKDAF

SEQ ID NO: 4704 - protein, 20 aa, Homo sapiens
LHQEYEENLGDSIVGYKEKS

SEQ ID NO: 4705 - protein, 20 aa, Homo sapiens
NGFTSVQGYAFNGTKLDAVY

SEQ ID NO: 4706 - protein, 13 aa, Homo sapiens
QVGKFPEDFESCD

SEQ ID NO: 4707 - protein, 12 aa, Homo sapiens
STDDYASFSRAL

SEQ ID NO: 4708 - protein, 20 aa, Homo sapiens
YVSIDVTLQQLESHSFYNLS

SEQ ID NO: 4709 - protein, 20 aa, Homo sapiens
YYVFFEEQEDEIIGFGQELK

SEQ ID NO: 4710 - protein, 21 aa, Homo sapiens
DLYTHSEYYNHAIDWQTGPGC

SEQ ID NO: 4711 - protein, 19 aa, Mus musculus
NTTDMMIFDLIHNYNRFPD

SEQ ID NO: 4712 - protein, 16 aa, Homo sapiens
YAFNGTKLDAVYLNKN

SEQ ID NO: 4713 - protein, 11 aa, Homo sapiens
NKPLITVTNSK

SEQ ID NO: 4714 - protein, 9 aa, Rattus norvegicus
PPGEQTMGV

SEQ ID NO: 4715 - protein, 20 aa, Homo sapiens
VCTPKSDEFNPCEDIMGYKF

SEQ ID NO: 4716 - protein, 50 aa, Homo sapiens
ATKKEEEKKGGDRNTGLSRDKDKKREEMKEVAKKEDDEKVKGERRNTDTR

SEQ ID NO: 4717 - protein, 39 aa, Homo sapiens
LLKENTSLLKLGYHFELAGPRMTVTNLLSRNMDKQRQKR

SEQ ID NO: 4718 - protein, 37 aa, Homo sapiens
RGRDASKKALGPRRNSDLGKEPKRGGLKKSFSRDRDE

SEQ ID NO: 4719 - protein, 27 aa, Homo sapiens
ADLSTAIASRSVADKILDLYKHPDNID

SEQ ID NO: 4720 - protein, 20 aa, Homo sapiens
AFQVGKFPEDFESCDSIPGM

SEQ ID NO: 4721 - protein, 20 aa, Homo sapiens
AHPPCHASARCRNTKGGFQC

SEQ ID NO: 4722 - protein, 20 aa, Homo sapiens
ALKALNAHWSADAVYQEARK

SEQ ID NO: 4723 - protein, 20 aa, Homo sapiens
APEPGIPGETRGPCFLAGDG

SEQ ID NO: 4724 - protein, 20 aa, Homo sapiens
DPLIRGLLARPAKLQVQDQL

SEQ ID NO: 4725 - protein, 20 aa, Homo sapiens
EESGRRVLVYSCRHGYELQG

SEQ ID NO: 4726 - protein, 20 aa, Homo sapiens
EGWDFQPPLCKDVNECADGA

SEQ ID NO: 4727 - protein, 20 aa, Homo sapiens
ESRVSSVLEESKRLVDTAMY

SEQ ID NO: 4728 - protein, 20 aa, Homo sapiens
FSKLPEPTSGVIARAAEIME

SEQ ID NO: 4729 - protein, 21 aa, Homo sapiens
GGADCQMTCENQNPCFPIQLP

SEQ ID NO: 4730 - protein, 20 aa, Homo sapiens
GLWLHQAFFSPWTLLRGGGL

SEQ ID NO: 4731 - protein, 21 aa, Homo sapiens
GMNLEAWRETFPDQDDKCGFP

SEQ ID NO: 4732 - protein, 20 aa, Homo sapiens
GRLPRATWISMSLAALLIGG

SEQ ID NO: 4733 - protein, 20 aa, Homo sapiens
HSLSRVICDNTGLTRVPMDA

SEQ ID NO: 4734 - protein, 20 aa, Homo sapiens
HVIQVSNEVVTDDDRYSDLL

SEQ ID NO: 4735 - protein, 20 aa, Homo sapiens
KCPNTCLANKYRPITGACNN

SEQ ID NO: 4736 - protein, 20 aa, Homo sapiens
LPISETGGGTPELRCGKHQA

SEQ ID NO: 4737 - protein, 20 aa, Homo sapiens
METSIQAMKRKVNLKTQQSQ

SEQ ID NO: 4738 - protein, 20 aa, Homo sapiens
NEWREFCGLPRLETPADLST

SEQ ID NO: 4739 - protein, 22 aa, Homo sapiens
NEWREFCGLPRLETPADLSTAI

SEQ ID NO: 4740 - protein, 12 aa, Homo sapiens
NIFEYQVDAQPL

SEQ ID NO: 4741 - protein, 20 aa, Homo sapiens
PCFLAGDGRASEVPSLTALH

SEQ ID NO: 4742 - protein, 25 aa, Homo sapiens
PGYNEWREFCGLPRLETPADLSTAI

SEQ ID NO: 4743 - protein, 45 aa, Homo sapiens
PGYNEWREFCGLPRLETPADLSTAIASRSVADKILDLYKHPDNID

SEQ ID NO: 4744 - protein, 18 aa, Homo sapiens
QESAGMEGRDTHRLPRAL

SEQ ID NO: 4745 - protein, 20 aa, Homo sapiens
QQSQHPTDALSEDLLSIIAN

SEQ ID NO: 4746 - protein, 20 aa, Homo sapiens
QRNLKKRGILSPAQLLSFSK

SEQ ID NO: 4747 - protein, 20 aa, Homo sapiens
RPITGACNNRDHPRWGASNT

SEQ ID NO: 4748 - protein, 20 aa, Homo sapiens
TEAFFPFISRGKELLWGKPE

SEQ ID NO: 4749 - protein, 20 aa, Homo sapiens
VGPYEGYDSTANPTVSNVFS

SEQ ID NO: 4750 - protein, 20 aa, Homo sapiens
YEDGFSQPRGWNPGFLYNGF

SEQ ID NO: 4751 - protein, 20 aa, Homo sapiens
YELQGREQLTCTQEGWDFQP

SEQ ID NO: 4752 - protein, 15 aa, Homo sapiens
ALKALNAHWSADAVY

SEQ ID NO: 4753 - protein, 20 aa, Homo sapiens
AMKRKVNLKTQQSQHPTDAL

SEQ ID NO: 4754 - protein, 18 aa, Homo sapiens
GLPRLETPADLSTAIASR

SEQ ID NO: 4755 - protein, 13 aa, Homo sapiens
HPTDALSEDLLSI

SEQ ID NO: 4756 - protein, 13 aa, Homo sapiens
HVIQVSNEVVTDD

SEQ ID NO: 4757 - protein, 15 aa, Homo sapiens
IASRSVADKILDLYK

SEQ ID NO: 4758 - protein, 20 aa, Homo sapiens
LYKHPDNIDVWLGGLAENFL

SEQ ID NO: 4759 - protein, 15 aa, Homo sapiens
MTCENQNPCFPIQLP

SEQ ID NO: 4760 - protein, 18 aa, Homo sapiens
VGALHQIITLRDYIPRIL

SEQ ID NO: 4761 - protein, 10 aa, Homo sapiens
LVVYPWTQRF

SEQ ID NO: 4762 - protein, 15 aa, Homo sapiens
AAGLLSTYRAFLSSH

SEQ ID NO: 4763 - protein, 27 aa, Homo sapiens
AAHLPAEFTPAVHASLDKFLASVSTVL

SEQ ID NO: 4764 - protein, 32 aa, Homo sapiens
AAHLPAEFTPAVHASLDKFLASVSTVLTSKYR

SEQ ID NO: 4765 - protein, 21 aa, Homo sapiens
AAWGKVGAHAGEYGAEALERM

SEQ ID NO: 4766 - protein, 29 aa, Homo sapiens
AAWGKVGAHAGEYGAEALERMFLSFPTTK

SEQ ID NO: 4767 - protein, 19 aa, Homo sapiens
AFTPEGERLIGDAAKNQLT

SEQ ID NO: 4768 - protein, 14 aa, Homo sapiens
AGLLSTYRAFLSSH

SEQ ID NO: 4769 - protein, 15 aa, Homo sapiens
AGNLGGGVVTIERSK

SEQ ID NO: 4770 - protein, 15 aa, Homo sapiens
AHLLILRDTKTYMLA

SEQ ID NO: 4771 - protein, 16 aa, Homo sapiens
AHLLILRDTKTYMLAF

SEQ ID NO: 4772 - protein, 13 aa, Homo sapiens
AKAVKQFEESQGR

SEQ ID NO: 4773 - protein, 17 aa, Homo sapiens
AKAVKQFEESQGRTSSK

SEQ ID NO: 4774 - protein, 12 aa, Homo sapiens
AKFEELNMDLFR

SEQ ID NO: 4775 - protein, 18 aa, Homo sapiens
AKVAVLGASGGIGQPLSL

SEQ ID NO: 4776 - protein, 16 aa, Homo sapiens
ASGNYATVISHNPETK

SEQ ID NO: 4777 - protein, 12 aa, Homo sapiens
ASVSTVLTSKYR

SEQ ID NO: 4778 - protein, 16 aa, Homo sapiens
AVPSPPPASPRSQYNF

SEQ ID NO: 4779 - protein, 19 aa, Homo sapiens
AVPSPPPASPRSQYNFIAD

SEQ ID NO: 4780 - protein, 24 aa, Homo sapiens
AVTELGRPDAEYWNSQKDLLEQKR

SEQ ID NO: 4781 - protein, 17 aa, Homo sapiens
AYVRLAPDYDALDVANK

SEQ ID NO: 4782 - protein, 18 aa, Homo sapiens
DGRGALQNIIPASTGAAK

SEQ ID NO: 4783 - protein, 13 aa, Homo sapiens
DGVIKVFNDMKVR

SEQ ID NO: 4784 - protein, 15 aa, Homo sapiens
DIPELVNMGQWKIRA

SEQ ID NO: 4785 - protein, 16 aa, Homo sapiens
DKFLASVSTVLTSKYR

SEQ ID NO: 4786 - protein, 18 aa, Homo sapiens
DPSPSPVLGYKIVYKPVG

SEQ ID NO: 4787 - protein, 10 aa, Homo sapiens
DRVYIHPFHL

SEQ ID NO: 4788 - protein, 13 aa, Homo sapiens
DTNADKQLSFEEF

SEQ ID NO: 4789 - protein, 16 aa, Homo sapiens
DVPKWISIMTERSVPH

SEQ ID NO: 4790 - protein, 12 aa, Homo sapiens
EDFRDGLKLMLL

SEQ ID NO: 4791 - protein, 14 aa, Homo sapiens
EDIVADHVASYGVN

SEQ ID NO: 4792 - protein, 15 aa, Homo sapiens
EGLTFQMKKNAEELK

SEQ ID NO: 4793 - protein, 11 aa, Homo sapiens
EITALAPSTMK

SEQ ID NO: 4794 - protein, 15 aa, Homo sapiens
EQFYVDLDKKETVWH

SEQ ID NO: 4795 - protein, 14 aa, Homo sapiens
FDPIIEDRHGGYKP

SEQ ID NO: 4796 - protein, 15 aa, Homo sapiens
FDPIIEDRHGGYKPS

SEQ ID NO: 4797 - protein, 11 aa, Homo sapiens
FDSDVGEYRAV

SEQ ID NO: 4798 - protein, 18 aa, Homo sapiens
FESFGDLSTPDAVMGNPK

SEQ ID NO: 4799 - protein, 20 aa, Homo sapiens
FESFGDLSTPDAVMGNPKVK

SEQ ID NO: 4800 - protein, 14 aa, Homo sapiens
FLASVSTVLTSKYR

SEQ ID NO: 4801 - protein, 10 aa, Homo sapiens
FLENVIRDAV

SEQ ID NO: 4802 - protein, 24 aa, Homo sapiens
FLSFPTTKTYFPHFDLSHGSAQVK

SEQ ID NO: 4803 - protein, 28 aa, Homo sapiens
FLSFPTTKTYFPHFDLSHGSAQVKGHGK

SEQ ID NO: 4804 - protein, 29 aa, Homo sapiens
FLSFPTTKTYFPHFDLSHGSAQVKGHGKK

SEQ ID NO: 4805 - protein, 15 aa, Homo sapiens
GAPAAATAPAPTAHK

SEQ ID NO: 4806 - protein, 15 aa, Homo sapiens
GELEKEEAQPIVTKY

SEQ ID NO: 4807 - protein, 15 aa, Homo sapiens
GGELRFTVTQRSQPG

SEQ ID NO: 4808 - protein, 15 aa, Homo sapiens
GKEYFAIDNSGRIIT

SEQ ID NO: 4809 - protein, 12 aa, Homo sapiens
GLTFQMKKNAEE

SEQ ID NO: 4810 - protein, 14 aa, Homo sapiens
GLTFQMKKNAEELK

SEQ ID NO: 4811 - protein, 15 aa, Homo sapiens
GNRIAQWQSFQLEGG

SEQ ID NO: 4812 - protein, 18 aa, Homo sapiens
GRMHAPGKGLSQSALPYR

SEQ ID NO: 4813 - protein, 14 aa, Homo sapiens
GTLIIRDVKESDQG

SEQ ID NO: 4814 - protein, 17 aa, Homo sapiens
GTQGKIVDLVKELDRDT

SEQ ID NO: 4815 - protein, 12 aa, Homo sapiens
IGSSQDDGLINR

SEQ ID NO: 4816 - protein, 16 aa, Homo sapiens
IGSSYFPEHGYFRAPE

SEQ ID NO: 4817 - protein, 9 aa, Homo sapiens
IKEESKTAV

SEQ ID NO: 4818 - protein, 8 aa, Homo sapiens
IPDWFLNR

SEQ ID NO: 4819 - protein, 16 aa, Homo sapiens
IRASYAQQPAESRVSG

SEQ ID NO: 4820 - protein, 13 aa, Homo sapiens
ISWYDNEFGYSNR

SEQ ID NO: 4821 - protein, 18 aa, Homo sapiens
IVNTNVPRASVPDGFLSE

SEQ ID NO: 4822 - protein, 22 aa, Homo sapiens
IVNTNVPRASVPDGFLSELTQQ

SEQ ID NO: 4823 - protein, 18 aa, Homo sapiens
IYTRNTKGGDAPAAGEDA

SEQ ID NO: 4824 - protein, 13 aa, Homo sapiens
KAVLTIDEKGTEA

SEQ ID NO: 4825 - protein, 15 aa, Homo sapiens
KAVLTIDEKGTEAAG

SEQ ID NO: 4826 - protein, 14 aa, Homo sapiens
KEYFAIDNSGRIIT

SEQ ID NO: 4827 - protein, 15 aa, Homo sapiens
KFLASVSTVLTSKYR

SEQ ID NO: 4828 - protein, 15 aa, Homo sapiens
KPGQFIRSVDPDSPA

SEQ ID NO: 4829 - protein, 26 aa, Homo sapiens
KTNVKAAWGKVGAHAGEYGAEALERM

SEQ ID NO: 4830 - protein, 21 aa, Homo sapiens
LAQATGKPPQYIAVHVVPDQL

SEQ ID NO: 4831 - protein, 14 aa, Homo sapiens
LISWYDNEFGYSNR

SEQ ID NO: 4832 - protein, 12 aa, Homo sapiens
LITPAVVSERLK

SEQ ID NO: 4833 - protein, 13 aa, Homo sapiens
LKKYLYEIARRHP

SEQ ID NO: 4834 - protein, 19 aa, Homo sapiens
LLTEAPLNPKANREKMTQI

SEQ ID NO: 4835 - protein, 10 aa, Homo sapiens
LLVVYPWTQR

SEQ ID NO: 4836 - protein, 11 aa, Homo sapiens
LLVVYPWTQRF

SEQ ID NO: 4837 - protein, 9 aa, Homo sapiens
LRVDPVNFK

SEQ ID NO: 4838 - protein, 10 aa, Homo sapiens
LSLQEPGSKT

SEQ ID NO: 4839 - protein, 22 aa, Homo sapiens
LVTLAAHLPAEFTPAVHASLDK

SEQ ID NO: 4840 - protein, 16 aa, Homo sapiens
NIFSFYLSRDPDAQPG

SEQ ID NO: 4841 - protein, 21 aa, Homo sapiens
PMFIVNTNVPRASVPDGFLSE

SEQ ID NO: 4842 - protein, 15 aa, Homo sapiens
QLQPDNSTLTWVKPT

SEQ ID NO: 4843 - protein, 18 aa, Homo sapiens
QVDQFLGVPYAAPPLAER

SEQ ID NO: 4844 - protein, 18 aa, Homo sapiens
QVTQPTVGMNFKTPRGPV

SEQ ID NO: 4845 - protein, 13 aa, Homo sapiens
REIFNMARDQRSR

SEQ ID NO: 4846 - protein, 12 aa, Homo sapiens
RFDSDVGEFRAV

SEQ ID NO: 4847 - protein, 14 aa, Homo sapiens
RGNSIIMLEALERV

SEQ ID NO: 4848 - protein, 13 aa, Homo sapiens
RLLLPGELAKHAV

SEQ ID NO: 4849 - protein, 18 aa, Homo sapiens
RLLLPGELAKHAVSEGTK

SEQ ID NO: 4850 - protein, 16 aa, Homo sapiens
RLPIIDVAPLDVGAPD

SEQ ID NO: 4851 - protein, 16 aa, Homo sapiens
RPKDYEVDATLKSLNN

SEQ ID NO: 4852 - protein, 16 aa, Homo sapiens
RVMTIAPGLFGTPLLT

SEQ ID NO: 4853 - protein, 13 aa, Homo sapiens
RYSVDIPLDKTVV

SEQ ID NO: 4854 - protein, 21 aa, Homo sapiens
SETAPAAPAAAPPAEKAPVKK

SEQ ID NO: 4855 - protein, 22 aa, Homo sapiens
SETAPAAPAAAPPAEKAPVKKK

SEQ ID NO: 4856 - protein, 33 aa, Homo sapiens
SGNFGGSRNMGGPYGGGNYGPGGSGGSGGYGGR

SEQ ID NO: 4857 - protein, 14 aa, Homo sapiens
SRAGLELGAEPETI

SEQ ID NO: 4858 - protein, 11 aa, Homo sapiens
SRTSGLLSSWK

SEQ ID NO: 4859 - protein, 14 aa, Homo sapiens
SVPRYLPRPANPDE

SEQ ID NO: 4860 - protein, 16 aa, Homo sapiens
SWNSGALTSGVHTFPA

SEQ ID NO: 4861 - protein, 14 aa, Homo sapiens
SWYDNEFGYSNRVV

SEQ ID NO: 4862 - protein, 18 aa, Homo sapiens
SYELPDGQVITIGNERFR

SEQ ID NO: 4863 - protein, 16 aa, Homo sapiens
TGAAPIIDVVRSGYYK

SEQ ID NO: 4864 - protein, 23 aa, Homo sapiens
TGGASGLGLATAERLVGQGASAV

SEQ ID NO: 4865 - protein, 13 aa, Homo sapiens
TGKNKWFFQKLRF

SEQ ID NO: 4866 - protein, 15 aa, Homo sapiens
TNVPPEVTVLTNSPV

SEQ ID NO: 4867 - protein, 14 aa, Homo sapiens
TQGKIVDLVKELDR

SEQ ID NO: 4868 - protein, 16 aa, Homo sapiens
TQGKIVDLVKELDRDT

SEQ ID NO: 4869 - protein, 11 aa, Homo sapiens
TVDGPSGKLWR

SEQ ID NO: 4870 - protein, 17 aa, Homo sapiens
TWLRNGKPVTTGVSETV

SEQ ID NO: 4871 - protein, 16 aa, Homo sapiens
TYFPHFDLSHGSAQVK

SEQ ID NO: 4872 - protein, 21 aa, Homo sapiens
TYFPHFDLSHGSAQVKGHGKK

SEQ ID NO: 4873 - protein, 29 aa, Homo sapiens
VADALTNAVAHVDDMPNALSALSDLHAHK

SEQ ID NO: 4874 - protein, 15 aa, Homo sapiens
VGAHAGEYGAEALER

SEQ ID NO: 4875 - protein, 24 aa, Homo sapiens
VGAHAGEYGAEALERMFLSFPTTK

SEQ ID NO: 4876 - protein, 17 aa, Homo sapiens
VHKAVLTIDEKGTEAAG

SEQ ID NO: 4877 - protein, 8 aa, Homo sapiens
VHLTPEEK

SEQ ID NO: 4878 - protein, 32 aa, Homo sapiens
VHLTPEEKSAVTALWGKVNVDEVGGEALGRLL

SEQ ID NO: 4879 - protein, 16 aa, Homo sapiens
VLSPADKTNVKAAWGK

SEQ ID NO: 4880 - protein, 32 aa, Homo sapiens
VLSPADKTNVKAAWGKVGAHAGEYGAEALERM

SEQ ID NO: 4881 - protein, 33 aa, Homo sapiens
VLSPADKTNVKAAWGKVGAHAGEYGAEALERMF

SEQ ID NO: 4882 - protein, 12 aa, Homo sapiens
VVDLMAHMASKE

SEQ ID NO: 4883 - protein, 11 aa, Homo sapiens
VWRLEEFGRFA

SEQ ID NO: 4884 - protein, 16 aa, Homo sapiens
WLRNGKPVTTGVSETV

SEQ ID NO: 4885 - protein, 10 aa, Homo sapiens
WRLEEFGRFA

SEQ ID NO: 4886 - protein, 14 aa, Homo sapiens
YDHNFVKAINAIQK

SEQ ID NO: 4887 - protein, 16 aa, Homo sapiens
YGGELRFTVTQRSQPG

SEQ ID NO: 4888 - protein, 16 aa, Homo sapiens
YPKSLHMYANRLLDHR

SEQ ID NO: 4889 - protein, 12 aa, Homo sapiens
YYKVDENGKISR

SEQ ID NO: 4890 - protein, 23 aa, Homo sapiens
AVTELGRPDAEYWNSQKDILEQK

SEQ ID NO: 4891 - protein, 18 aa, Homo sapiens
CPTPCQLQAEQAFLRTVQ

SEQ ID NO: 4892 - protein, 17 aa, Homo sapiens
FIVNTNVPRASVPDGFL

SEQ ID NO: 4893 - protein, 11 aa, Homo sapiens
LLIPTSFSPLK

SEQ ID NO: 4894 - protein, 20 aa, Homo sapiens
PAAPAAPAPAEKTPVKKKAR

SEQ ID NO: 4895 - protein, 764 aa, Homo sapiens
MRPADLLQLVLLLDLPRDLGGMGCSSPPCECHQEEDFRVTCKDIQRIPSLPPSTQTLKLIETHLRTIPSHAFSNLPNISRIYVSIDVTLQQLESHSFYNLSKVTHIEIRNTRNLTYIDPDALKELPLLKFLGIFNTGLKMFPDLTKVYSTDIFFILEITDNPYMTSIPVNAFQGLCNETLTLKLYNNGFTSVQGYAFNGTKLDAVYLNKNKYLTVIDKDAFGGVYSGPSLLDVSQTSVTALPSKGLEHLKELIARNTWTLKKLPLSLSFLHLTRADLSYPSHCCAFKNQKKIRGILESLMCNESSMQSLRQRKSVNALNSPLHQEYEENLGDSIVGYKEKSKFQDTHNNAHYYVFFEEQEDEIIGFGQELKNPQEETLQAFDSHYDYTICGDSEDMVCTPKSDEFNPCEDIMGYKFLRIVVWFVSLLALLGNVFVLLILLTSHYKLNVPRFLMCNLAFADFCMGMYLLLIASVDLYTHSEYYNHAIDWQTGPGCNTAGFFTVFASELSVYTLTVITLERWYAITFAMRLDRKIRLRHACAIMVGGWVCCFLLALLPLVGISSYAKVSICLPMDTETPLALAYIVFVLTLNIVAFVIVCCCYVKIYITVRNPQYNPGDKDTKIAKRMAVLIFTDFICMAPISFYALSAILNKPLITVSNSKILLVLFYPLNSCANPFLYAIFTKAFQRDVFILLSKFGICKRQAQAYRGQRVPPKNSTDIQVQKVTHDMRQGLHNMEDVYELIENSHLTPKKQGQISEEYMQTVL

SEQ ID NO: 4896 - protein, 9 aa, Homo sapiens
ALAVLSVTL

SEQ ID NO: 4897 - protein, 9 aa, Homo sapiens
ALSEDLLSI

SEQ ID NO: 4898 - protein, 9 aa, Homo sapiens
GLLDQVAAL

SEQ ID NO: 4899 - protein, 9 aa, Homo sapiens
GLREDLLSL

SEQ ID NO: 4900 - protein, 9 aa, Homo sapiens
LLIGGFAGL

SEQ ID NO: 4901 - protein, 10 aa, Homo sapiens
SLQDVPLAAL

SEQ ID NO: 4902 - protein, 9 aa, Streptococcus pyogenes
ALEKLNKEL

SEQ ID NO: 4903 - protein, 9 aa, Homo sapiens
EFQKMRRDL

SEQ ID NO: 4904 - protein, 9 aa, Streptococcus pyogenes
KLNKELEES

SEQ ID NO: 4905 - protein, 9 aa, Homo sapiens
KMRRDLEEA

SEQ ID NO: 4906 - protein, 43 aa, Homo sapiens
AERAALEELVKLQGERVRGLKQQKASAELIEEEVAKLLKLKAQ

SEQ ID NO: 4907 - protein, 25 aa, Homo sapiens
VAGRGRGRGRGRGRGRGRGRGGPRR

SEQ ID NO: 4908 - protein, 10 aa, Homo sapiens
GSASPMELLS

SEQ ID NO: 4909 - protein, 10 aa, Homo sapiens
IFMSNSYPRD

SEQ ID NO: 4910 - protein, 12 aa, Homo sapiens
RLDNRYQPMEPN

SEQ ID NO: 4911 - protein, 10 aa, Homo sapiens
SARIPCFLAG

SEQ ID NO: 4912 - protein, 10 aa, Homo sapiens
WDGERLYQEA

SEQ ID NO: 4913 - protein, 10 aa, Homo sapiens
WTPGVKRNGF

SEQ ID NO: 4914 - protein, 10 aa, Homo sapiens
YRSYNDSVDP

SEQ ID NO: 4915 - protein, 7 aa, Helicobacter pylori
AKEERRY

SEQ ID NO: 4916 - protein, 7 aa, unidentified
  REGION 1..7: note = epitope involved in autoimmune pancreatitis
RFEQPRV

SEQ ID NO: 4917 - protein, 7 aa, unidentified
  REGION 1..7: note = epitope involved in autoimmune pancreatitis
SKDERRF

SEQ ID NO: 4918 - protein, 15 aa, Mycobacterium avium
TCRRMLAFLKDKENR

SEQ ID NO: 4919 - protein, 15 aa, Homo sapiens
GEALSTLVLNRLKVG

SEQ ID NO: 4920 - protein, 15 aa, Mycobacterium sp.
GEALSTLVVNKIRGT

SEQ ID NO: 4921 - protein, 15 aa, Mycobacterium sp.
IAGLFLTTEAVVADK

SEQ ID NO: 4922 - protein, 15 aa, Homo sapiens
VASLLTTAEVVVTEI

SEQ ID NO: 4923 - protein, 9 aa, unidentified
  REGION 1..9: note = epitope involved in Crohn's disease
GGIYQDLVS

SEQ ID NO: 4924 - protein, 9 aa, unidentified
  REGION 1..9: note = epitope involved in Crohn's disease
GLLAQQMDY

SEQ ID NO: 4925 - protein, 9 aa, unidentified
  REGION 1..9: note = epitope involved in Crohn's disease
RLVGQQVMQ

SEQ ID NO: 4926 - protein, 9 aa, unidentified
  REGION 1..9: note = epitope involved in Crohn's disease
RQSDGQYQM

SEQ ID NO: 4927 - protein, 9 aa, unidentified
  REGION 1..9: note = epitope involved in Crohn's disease
YRWLPPSSA

SEQ ID NO: 4928 - protein, 15 aa, Mycobacterium avium
AGDLSKVDAKQPGDY

SEQ ID NO: 4929 - protein, 15 aa, Homo sapiens
CQALVRMLAKKPGWK

SEQ ID NO: 4930 - protein, 15 aa, Homo sapiens
DFTYDQVAFNGLPQF

SEQ ID NO: 4931 - protein, 15 aa, Homo sapiens
DKIRGEGMRYIIILD

SEQ ID NO: 4932 - protein, 15 aa, Mycobacterium avium
ERPLKQIAFNGGLEP

SEQ ID NO: 4933 - protein, 15 aa, Homo sapiens
GRGNGDPGGGMEKDG

SEQ ID NO: 4934 - protein, 15 aa, Mycobacterium avium
LAKLAGGVAVICAGA

SEQ ID NO: 4935 - protein, 15 aa, Homo sapiens
LAKLGGAGQAARAGT

SEQ ID NO: 4936 - protein, 14 aa, Homo sapiens
NEHPVFAYLKDKLP

SEQ ID NO: 4937 - protein, 15 aa, Mycobacterium avium
QLELTEGMRFDKGYI

SEQ ID NO: 4938 - protein, 11 aa, unidentified
  REGION 1..11: note = epitope involved in Crohn's disease
CNLWEVMHGTC

SEQ ID NO: 4939 - protein, 11 aa, unidentified
  REGION 1..11: note = epitope involved in Crohn's disease
CSIGEALSHGC

SEQ ID NO: 4940 - protein, 9 aa, unidentified
  REGION 1..9: note = epitope involved in Crohn's disease
PWATLVAES

SEQ ID NO: 4941 - protein, 9 aa, unidentified
  REGION 1..9: note = epitope involved in Crohn's disease
TMWDALEAP

SEQ ID NO: 4942 - protein, 15 aa, Mycobacterium avium
TCRRMLAFLKDKENR

SEQ ID NO: 4943 - protein, 5 aa, Homo sapiens
PKKAK

SEQ ID NO: 4944 - protein, 15 aa, Mycobacterium avium
AGDLSKVDAKQPGDY

SEQ ID NO: 4945 - protein, 15 aa, Homo sapiens
CQALVRMLAKKPGWK

SEQ ID NO: 4946 - protein, 15 aa, Homo sapiens
DFTYDQVAFNGLPQF

SEQ ID NO: 4947 - protein, 15 aa, Homo sapiens
DKIRGEGMRYIIILD

SEQ ID NO: 4948 - protein, 15 aa, Mycobacterium avium
ERPLKQIAFNGGLEP

SEQ ID NO: 4949 - protein, 15 aa, Homo sapiens
GRGNGDPGGGMEKDG

SEQ ID NO: 4950 - protein, 14 aa, Homo sapiens
NEHPVFAYLKDKLP

SEQ ID NO: 4951 - protein, 15 aa, Mycobacterium avium
QLELTEGMRFDKGYI

SEQ ID NO: 4952 - protein, 9 aa, Homo sapiens
AHWSGHCCL

SEQ ID NO: 4953 - protein, 15 aa, Mycobacterium avium
TCRRMLAFLKDKENR

SEQ ID NO: 4954 - protein, 5 aa, Homo sapiens
PKKAK

SEQ ID NO: 4955 - protein, 15 aa, Mycobacterium avium
AGDLSKVDAKQPGDY

SEQ ID NO: 4956 - protein, 15 aa, Homo sapiens
CQALVRMLAKKPGWK

SEQ ID NO: 4957 - protein, 15 aa, Homo sapiens
DFTYDQVAFNGLPQF

SEQ ID NO: 4958 - protein, 15 aa, Homo sapiens
DKIRGEGMRYIIILD

SEQ ID NO: 4959 - protein, 15 aa, Mycobacterium avium
ERPLKQIAFNGGLEP

SEQ ID NO: 4960 - protein, 15 aa, Homo sapiens
GRGNGDPGGGMEKDG

SEQ ID NO: 4961 - protein, 14 aa, Homo sapiens
NEHPVFAYLKDKLP

SEQ ID NO: 4962 - protein, 15 aa, Mycobacterium avium
QLELTEGMRFDKGYI

SEQ ID NO: 4963 - protein, 9 aa, Homo sapiens
AHWSGHCCL

SEQ ID NO: 4964 - protein, 15 aa, Mycobacterium avium
TCRRMLAFLKDKENR

SEQ ID NO: 4965 - protein, 5 aa, Homo sapiens
PKKAK

SEQ ID NO: 4966 - protein, 15 aa, Mycobacterium avium
AGDLSKVDAKQPGDY

SEQ ID NO: 4967 - protein, 15 aa, Homo sapiens
CQALVRMLAKKPGWK

SEQ ID NO: 4968 - protein, 15 aa, Homo sapiens
DFTYDQVAFNGLPQF

SEQ ID NO: 4969 - protein, 15 aa, Homo sapiens
DKIRGEGMRYIIILD

SEQ ID NO: 4970 - protein, 15 aa, Mycobacterium avium
ERPLKQIAFNGGLEP

SEQ ID NO: 4971 - protein, 15 aa, Homo sapiens
GRGNGDPGGGMEKDG

SEQ ID NO: 4972 - protein, 14 aa, Homo sapiens
NEHPVFAYLKDKLP

SEQ ID NO: 4973 - protein, 15 aa, Mycobacterium avium
QLELTEGMRFDKGYI

SEQ ID NO: 4974 - protein, 9 aa, Homo sapiens
AHWSGHCCL

SEQ ID NO: 4975 - protein, 304 aa, Homo sapiens
MGNHAGKRELNAEKASTNSETNRGESEKKRNLGELSRTTSEDNEVFGEADANQNNGTSSQDTAVTDSKRTADPKNAWQDAHPADPGSRPHLIRLFSRDAPGREDNTFKDRPSESDELQTIQEDSAATSESLDVMASQKRPSQRHGSKYLATASTMDHARHGFLPRHRDTGILDSIGRFFGGDRGAPKRGSGKDSHHPARTAHYGSLPQKSHGRTQDENPVVHFFKNIVTPRTPPPSQGKGRGLSLSRFSWGAEGQRPGFGYGGRASDYKSAHKGFKGVDAQGTLSKIFKLGGRDSRSGSPMARR

SEQ ID NO: 4976 - protein, 203 aa, Homo sapiens [sequence omitted]

SEQ ID NO: 4977 - protein, 277 aa, Homo sapiens
MGLLECCARCLVGAPFASLVATGLCFFGVALFCGCGHEALTGTEKLIETYFSKNYQDYEYLINVIHAFQYVIYGTASFFFLYGALLLAEGFYTTGAVRQIFGDYKTTICGKGLSATVTGGQKGRGSRGQHQAHSLERVCHCLGKWLGHPDKFVGITYALTVVWLLVFACSAVPVYIYFNTWTTCQSIAFPSKTSASIGSLCADARMYGVLPWNAFPGKVCGSNLLSICKTAEFQMTFHLFIAAFVGAAATLVSLLTFMIAATYNFAVLKLMGRGTKF

SEQ ID NO: 4978 - protein, 295 aa, Homo sapiens [sequence omitted]

SEQ ID NO: 4979 - protein, 323 aa, Homo sapiens
MSDRPTARRWGKCGPLCTRENIMVAFKGVWTQAFWKAVTAEFLAMLIFVLLSLGSTINWGGTEKPLPVDMVLISLCFGLSIATMVQCFGHISGGHINPAVTVAMVCTRKISIAKSVFYIAAQCLGAIIGAGILYLVTPPSVVGGLGVTMVHGNLTAGHGLLVELIITFQLVFTIFASCDSKRTDVTGSIALAIGFSVAIGHLFAINYTGASMNPARSFGPAVIMGNWENHWIYWVGPIIGAVLAGGLYEYVFCPDVEFKRRFKEAFSKAAQQTKGSYMEVEDNRSQVETDDLILKPGVVHVIDVDRGEEKKGKDQSGEVLSSV

SEQ ID NO: 4980 - protein, 582 aa, Homo sapiens
MIFLTALPLFWIMISASRGGHWGAWMPSSISAFEGTCVSIPCRFDFPDELRPAVVHGVWYFNSPYPKNYPPVVFKSRTQVVHESFQGRSRLLGDLGLRNCTLLLSNVSPELGGKYYFRGDLGGYNQYTFSEHSVLDIVNTPNIVVPPEVVAGTEVEVSCMVPDNCPELRPELSWLGHEGLGEPAVLGRLREDEGTWVQVSLLHFVPTREANGHRLGCQASFPNTTLQFEGYASMDVKYPPVIVEMNSSVEAIEGSHVSLLCGADSNPPPLLTWMRDGTVLREAVAESLLLELEEVTPAEDGVYACLAENAYGQDNRTVGLSVMYAPWKPTVNGTMVAVEGETVSILCSTQSNPDPILTIFKEKQILSTVIYESELQLELPAVSPEDDGEYWCVAENQYGQRATAFNLSVEFAPVLLLESHCAAARDTVQCLCVVKSNPEPSVAFELPSRNVTVNESEREFVYSERSGLVLTSILTLRGQAQAPPRVICTARNLYGAKSLELPFQGAHRLMWAKIGPVGAVVAFAILIAIVCYITQTRRKKNVTESPSFSAGDNPPVLFSSDFRISGAPEKYESKEVSTLESH

SEQ ID NO: 4981 - protein, 110 aa, Homo sapiens
MALWMRLLPLLALLALWGPDPAAAFVNQHLCGSHLVEALYLVCGERGFFYTPKTRREAEDLQVGQVELGGGPGAGSLQPLALEGSLQKRGIVEQCCTSICSLYQLENYCN

SEQ ID NO: 4982 - protein, 180 aa, Homo sapiens
IAPVFVLMEQITLKKMRKIVGWSNKDGDGIFSPGGAISNMYSIMAARYKYFPEVKTKGMAAVPKLVLFTSEHSHYSIKKAGAALGFGTDNVILIKCNERGKIIPADLEAKILDAKQKGYVPLYVNATAGTTVYGAFDPIQEIADICEKYNLWLHVDAAWGGGLLMSRKHRHKLSGIERAN

SEQ ID NO: 4983 - protein, 296 aa, Triticum urartu
MKTFLILALLAIVATTATTAVRVPVPQPQPQNPSQPQPQRQVPLVQQQQFPGQQQQFPPQQPYPQPQPFPSQQPYLQLQPFPQPQPFPPQLPYPQPPPFSPQQPYPQPQPQYPQPQQPISQQQAQQQQQQQQQQQQQQQQQQILPQILQQQLIPCRDVVLQQHNIAHARSQVLQQSTYQPLQQLCCQQLWQIPEQSRCQAIHNVVHAIILHQQQQQQQPSSQVSLQQPQQQYPSGQGFFQPSQQNPQAQGSVQPQQLPQFEEIRNLALQTLPRMCNVYIPPYCSTTTAPFGIFGTN

SEQ ID NO: 4984 - protein, 275 aa, Triticum durum
MNIQVDPSSQVQWPQQQPFLQPHQPFSQQPQQIFPQPQQTFPHQPQQQFPQPQQPQRQFLQPRQPFPQQPQQPYPQQPQQPFPQTQQPQQPFPQSKQPQQPFPQPQQPQQSFPQQQPSLIQQSLQQQLNPCKNFLLQQCKPVSLVSSLWSIILPPSDCQVMRQQCCQQLAQIPQQLQCAAIHSVVHSIIMQQEQQEQLQGVQILVPLSQQQQVGQGILVQGQGIIQPQQPAQLEVIRSLVLQTLPTMCNVYVPPYCSTIRAPFASIVAGIGGQYR

SEQ ID NO: 4985 - protein, 282 aa, Triticum aestivum
MNIQVDPSSQVPWPQQQPFPQPHQPFSQQPQQTFPQPQQTFPHQPQQQFSQPQQPQQQFIQPQQPFPQQPQQTYPQRPQQPFPQTQQPQQPFPQSQQPQQPFPQPQQQFPQPQQPQQSFPQQQPSLIQQSLQQQLNPCKNFLLQQCKPVSLVSSLWSMILPRSDCQVMRQQCCQQLAQIPQQLQCAAIHSIVHSIIMQQEQQEQRQGVQILVPLSQQQQVGQGTLVQGQGIIQPQQPAQLEVIRSLVLQTLATMCNVYVPPYCSTIRAPFASIVAGIGGQYR

SEQ ID NO: 4986 - protein, 9 aa, Triticum sp.
PFPQPELPY

SEQ ID NO: 4987 - protein, 9 aa, Triticum sp.
PYPQPELPY

SEQ ID NO: 4988 - protein, 9 aa, Triticum sp.
PQPELPYPW

SEQ ID NO: 4989 - protein, 10 aa, Triticum sp.
FRPPEQPYPQ

SEQ ID NO: 4990 - protein, 9 aa, Triticum sp.
PQQSFPEQQ

SEQ ID NO: 4991 - protein, 9 aa, Triticum sp.
IQPEQPAQL

SEQ ID NO: 4992 - protein, 9 aa, Triticum sp.
QQPEQPYPQ

SEQ ID NO: 4993 - protein, 9 aa, Triticum sp.
SQPEQEFPQ

SEQ ID NO: 4994 - protein, 9 aa, Triticum sp.
PQPEQEFPQ

SEQ ID NO: 4995 - protein, 9 aa, Triticum sp.
QQPEQPFPQ

SEQ ID NO: 4996 - protein, 9 aa, Triticum sp.
PQPEQPFCQ

SEQ ID NO: 4997 - protein, 9 aa, Triticum sp.
QQPFPEQPQ

SEQ ID NO: 4998 - protein, 9 aa, Triticum sp.
PFPQPEQPF

SEQ ID NO: 4999 - protein, 9 aa, Triticum sp.
PQPEQPFPW

SEQ ID NO: 5000 - protein, 9 aa, Triticum sp.
PFSEQEQPV

SEQ ID NO: 5001 - protein, 9 aa, Triticum sp.
FSQQQESPF

SEQ ID NO: 5002 - protein, 9 aa, Triticum sp.
PFPQPEQPF

SEQ ID NO: 5003 - protein, 9 aa, Triticum sp.
PQPEQPFPQ

SEQ ID NO: 5004 - protein, 9 aa, Triticum sp.
PIPEQPQPY

SEQ ID NO: 5005 - protein, 9 aa, Triticum sp.
PFPQPEQPF

SEQ ID NO: 5006 - protein, 9 aa, Triticum sp.
PQPEQPFPQ

SEQ ID NO: 5007 - protein, 9 aa, Triticum sp.
PYPEQEEPF

SEQ ID NO: 5008 - protein, 9 aa, Triticum sp.
PYPEQEQPF

SEQ ID NO: 5009 - protein, 9 aa, Triticum sp.
PFSEQEQPV

SEQ ID NO: 5010 - protein, 9 aa, Triticum sp.
EGSFQPSQE

SEQ ID NO: 5011 - protein, 9 aa, Triticum sp.
EQPQQPFPQ

SEQ ID NO: 5012 - protein, 9 aa, Triticum sp.
EQPQQPYPE

SEQ ID NO: 5013 - protein, 9 aa, Triticum sp.
QFYYPTSPQ

SEQ ID NO: 5014 - protein, 9 aa, Triticum sp.
EGSFQPSQE

SEQ ID NO: 5015 - protein, 9 aa, Triticum sp.
PQQSFPEQE

SEQ ID NO: 5016 - protein, 9 aa, Triticum sp.
QFYYPTSPQ

SEQ ID NO: 5017 - protein, 239 aa, Homo sapiens; identical to SEQ ID NO: 4577

SEQ ID NO: 5018 - protein, 20 aa, Homo sapiens
SPATWTTRGFVFTRHSQTTA

SEQ ID NO: 5019 - protein, 21 aa, Homo sapiens
VFTRHSQTTAIPSCPEGTVPL

SEQ ID NO: 5020 - protein, 20 aa, Homo sapiens
IPSCPEGTVPLYSGFSFLFV

SEQ ID NO: 5021 - protein, 20 aa, Homo sapiens
LYSGFSFLFVQGNQRAHGQD

SEQ ID NO: 5022 - protein, 20 aa, Homo sapiens
FTTMPFLFCNVNDVCNFASR

SEQ ID NO: 5023 - protein, 21 aa, Homo sapiens
VNDVCNFASRNDYSYWLSTPA

SEQ ID NO: 5024 - protein, 20 aa, Homo sapiens
TGRALEPYISRCTVCEGPAI

SEQ ID NO: 5025 - protein, 19 aa, Homo sapiens
RCTVCEPAIAIAVHSQTTD

SEQ ID NO: 5026 - protein, 20 aa, Homo sapiens
IPPCPHGWISLWKGFSFIMF

SEQ ID NO: 5027 - protein, 20 aa, Homo sapiens
LWKGFSFIMFTSAGSEGTQG

SEQ ID NO: 5028 - protein, 20 aa, Homo sapiens
NSYSFWLASLNPERMFRKPI

SEQ ID NO: 5029 - protein, 19 aa, Mus musculus
ATGTRMRGFIFTRHSTTAI

SEQ ID NO: 5030 - protein, 20 aa, Mus musculus
FIFTRHSQTTAIPSCPEGTQ

SEQ ID NO: 5031 - protein, 20 aa, Mus musculus
TTAIPSCPEGTQPLYSGFSL

SEQ ID NO: 5032 - protein, 20 aa, Mus musculus
EGTQPLYSGFSLLFVQGNKR

SEQ ID NO: 5033 - protein, 20 aa, Mus musculus
FLFCNINNVCNFASRNDYSY

SEQ ID NO: 5034 - protein, 20 aa, Mus musculus
VCNFASRNDYSYWLSTPALM

SEQ ID NO: 5035 - protein, 20 aa, Mus musculus
APISGRALEPYISRCTVCEG

SEQ ID NO: 5036 - protein, 20 aa, Mus musculus
EPYISRCTVCEGPAMAIAVH

SEQ ID NO: 5037 - protein, 20 aa, Mus musculus
AIPPCPQDWVSLWKGFSFIM

SEQ ID NO: 5038 - protein, 21 aa, Mus musculus
WVSLWKGEFSFIMFTSAGSEG

SEQ ID NO: 5039 - protein, 20 aa, Mus musculus
SFWLASLNPERMFRKPIPST

SEQ ID NO: 5040 - protein, 20 aa, Triticum sp.
PQPFPPQLPYPQPQLPYPQP

SEQ ID NO: 5041 - protein, 20 aa, Triticum sp.
MQLQPFPQPQLPYPQPQLPY

SEQ ID NO: 5042 - protein, 20 aa, Triticum sp.
QPFPQPQQPFPWQPQQPFPQ

SEQ ID NO: 5043 - protein, 20 aa, Triticum sp.
PQQPQQPFPQPQQPIPVQPQ

SEQ ID NO: 5044 - protein, 20 aa, Triticum sp.
PQQQQPFPQPQQPFSQQPQQ

SEQ ID NO: 5045 - protein, 20 aa, Triticum sp.
QQPQQPFPQPQLPFPQQSEQ

SEQ ID NO: 5046 - protein, 20 aa, Triticum sp.
WPQQQPFPQPQQPFCQQPQQ

SEQ ID NO: 5047 - protein, 20 aa, Triticum sp.
LQLQPFPQPQLPYSQPQPFR

SEQ ID NO: 5048 - protein, 20 aa, Triticum sp.
LQPFPQPQPFLPQLPYPQPQ

SEQ ID NO: 5049 - protein, 20 aa, Triticum sp.
SQQPQQQFSQPQQQFPQPQQ

SEQ ID NO: 5050 - protein, 20 aa, Triticum sp.
QAFPQPQQTFPHQPQQQFPQ

SEQ ID NO: 5051 - protein, 20 aa, Triticum sp.
CKVFLQQQCSPVAMPQRLAR

SEQ ID NO: 5052 - protein, 20 aa, Triticum sp.
LQLQPFPQPQLPYLQPQPFR

SEQ ID NO: 5053 - protein, 20 aa, Triticum sp.
QQQFIQPQQPFPQQPQQTYP

SEQ ID NO: 5054 - protein, 20 aa, Triticum sp.
SHIPGLERPWQQQPLPPQQT

SEQ ID NO: 5055 - protein, 20 aa, Triticum sp.
SQQPQQPFPQPQQQFPQPQQ

SEQ ID NO: 5056 - protein, 20 aa, Triticum sp.
QQPFPQPQQPQLPFPQQPQQ

SEQ ID NO: 5057 - protein, 20 aa, Triticum sp.
PQLPYPQPQLPYPQPQPFRP

SEQ ID NO: 5058 - protein, 20 aa, Triticum sp.
QPFPQPQQPFPWQPQQPFPQ

SEQ ID NO: 5059 - protein, 20 aa, Triticum sp.
FPELQQPIPQQPQQPFPLQP

SEQ ID NO: 5060 - protein, 20 aa, Triticum sp.
QGQQGYYPISPQQSGQGQQP

SEQ ID NO: 5061 - protein, 20 aa, Triticum sp.
LQPGQGQPGYYPTSPQQIGQ

SEQ ID NO: 5062 - protein, 20 aa, Triticum sp.
QQFLQPQQPFPQQPQQPYPQ

SEQ ID NO: 5063 - protein, 20 aa, Triticum sp.
PGQGQSGYYPTSPQQSGQKQ

SEQ ID NO: 5064 - protein, 20 aa, Triticum sp.
TPIQPQQPFPQQPQQPQQPF

SEQ ID NO: 5065 - protein, 20 aa, Triticum sp.
PQQPQQPFPLQPQQPFPQQP

SEQ ID NO: 5066 - protein, 20 aa, Triticum sp.
PFTQPQQPTPIQPQQPFPQQ

SEQ ID NO: 5067 - protein, 20 aa, Triticum sp.
PQQPFPQPQQTFPQQPQLPF

SEQ ID NO: 5068 - protein, 20 aa, Triticum sp.
GQGQSGYYPTSPQQSGQEAT

SEQ ID NO: 5069 - protein, 20 aa, Triticum sp.
PLQPQQPFPQQPQQPFPQPQ

SEQ ID NO: 5070 - protein, 20 aa, Triticum sp.
QPFPQLQQPQQPLPQPQQPQ

SEQ ID NO: 5071 - protein, 20 aa, Triticum sp.
QQPFPQQPQQPFPQPQQPIP

SEQ ID NO: 5072 - protein, 20 aa, Triticum sp.
PQQPFPQPQQTFPQQPQLPF

SEQ ID NO: 5073 - protein, 20 aa, Triticum sp.
VAHAIIMHQQQQQQQEQKQQ

SEQ ID NO: 5074 - protein, 20 aa, Triticum sp.
PQQPFPQQPQQQFPQPQQPQ

SEQ ID NO: 5075 - protein, 20 aa, Triticum sp.
QQPAQYEVIRSLVLRTLPNM

SEQ ID NO: 5076 - protein, 20 aa, Triticum sp.
ATANMQVDPSGQVQWPQQQP

SEQ ID NO: 5077 - protein, 20 aa, Hordeum vulgare
QPFPQPQQPFPWQPQQPFPQ

SEQ ID NO: 5078 - protein, 20 aa, Hordeum vulgare
WQPQQPFPQPQQPFPLQPQQ

SEQ ID NO: 5079 - protein, 20 aa, Hordeum vulgare
QPQQPFPQPQQPIPYQPQQP

SEQ ID NO: 5080 - protein, 20 aa, Hordeum vulgare
QPQQPQPFPQQPVPQQPQPY

SEQ ID NO: 5081 - protein, 20 aa, Hordeum vulgare
PQPFPQQPIPQQPQPYPQQP

SEQ ID NO: 5082 - protein, 20 aa, Hordeum vulgare
QQPQPFSQQPIPQQPQPYPQ

SEQ ID NO: 5083 - protein, 20 aa, Hordeum vulgare
QSQQQFPQPQQPFPQQPQQP

SEQ ID NO: 5084 - protein, 20 aa, Hordeum vulgare
PQPFPQQPIPQQPQPYPQQP

SEQ ID NO: 5085 - protein, 20 aa, Hordeum vulgare
QQPFPQQPFPQQPQPYPQQP

SEQ ID NO: 5086 - protein, 20 aa, Hordeum vulgare
PQQPQQPFPQPQQPFSWQPQ

SEQ ID NO: 5087 - protein, 20 aa, Hordeum vulgare
QPQPYPQQPQPYPQQPFQPQ

SEQ ID NO: 5088 - protein, 20 aa, Hordeum vulgare
QQPFPQQPFPQQPQPYPQQP

SEQ ID NO: 5089 - protein, 20 aa, Hordeum vulgare
PQPYPQQPQPFPQQPPFCQQ

SEQ ID NO: 5090 - protein, 20 aa, Hordeum vulgare
FQQPQQSYPVQPQQPFPQPQ

SEQ ID NO: 5091 - protein, 20 aa, Hordeum vulgare
YPQQPQPFPQQPIPQQPQPY

SEQ ID NO: 5092 - protein, 20 aa, Hordeum vulgare
QQQPFPQQPIPQQPQPYPQQ

SEQ ID NO: 5093 - protein, 20 aa, Hordeum vulgare
QPQQPQPFPQQPVPQQPQPY

SEQ ID NO: 5094 - protein, 20 aa, Hordeum vulgare
QPQPFPQQPIPLQPHQPYTQ

SEQ ID NO: 5095 - protein, 20 aa, Hordeum vulgare
LPRPQQPFPWQPQQPFPQPQ

SEQ ID NO: 5096 - protein, 20 aa, Hordeum vulgare
QQPFPLQPQQPFPQPQPFPQ

SEQ ID NO: 5097 - protein, 20 aa, Hordeum vulgare
PFPQQPQQPFPQPQQPFRQQ

SEQ ID NO: 5098 - protein, 20 aa, Hordeum vulgare
PQQPFQPQQPFPQQTIPQQP

SEQ ID NO: 5099 - protein, 20 aa, Hordeum vulgare
NPLQPQQPFPLQPQPPQQPF

SEQ ID NO: 5100 - protein, 20 aa, Hordeum vulgare
NPLQPQQPFPLQPQPPQQPF

SEQ ID NO: 5101 - protein, 20 aa, Hordeum vulgare
PFPQQPQQPFPQPQQPFRQQ

SEQ ID NO: 5102 - protein, 20 aa, Hordeum vulgare
QPQQPFPLQPQQPFPWQPQQ

SEQ ID NO: 5103 - protein, 20 aa, Hordeum vulgare
TFPPSQQPNPLQPQQPFPLQ

SEQ ID NO: 5104 - protein, 20 aa, Hordeum vulgare
PQQTIPQQPQQPFPLQPQQP

SEQ ID NO: 5105 - protein, 20 aa, Hordeum vulgare
QPQQPFSFSQQPQQPFPLQP

SEQ ID NO: 5106 - protein, 20 aa, Hordeum vulgare
QQPFPQQPFPQQPQPYPQQP

SEQ ID NO: 5107 - protein, 20 aa, Secale cereale
QQLPLQPQQPFPQPQQPIPQ

SEQ ID NO: 5108 - protein, 20 aa, Secale cereale
SIPQPQQPFPQPQQPFPQSQ

SEQ ID NO: 5109 - protein, 20 aa, Secale cereale
QPFPQPQQPTPIQPQQPFPQ

SEQ ID NO: 5110 - protein, 20 aa, Secale cereale
QPFPQPQQPTPIQPQQPFPQ

SEQ ID NO: 5111 - protein, 20 aa, Secale cereale
PAPIQPQQPFPQQPQQPFPQ

SEQ ID NO: 5112 - protein, 20 aa, Secale cereale
PQQPFPQQPEQIIPQQPQQP

SEQ ID NO: 5113 - protein, 20 aa, Secale cereale
QYSPYQPQQPFPQPQQPTPI

SEQ ID NO: 5114 - protein, 20 aa, Secale cereale
SQQPQRPQQPFPQQPQQIIP

SEQ ID NO: 5115 - protein, 20 aa, Secale cereale
QQLPLQPQQPFPQPQQPIPQ

SEQ ID NO: 5116 - protein, 20 aa, Secale cereale
FPLQPQQPFPQQPEQIISQQ

SEQ ID NO: 5117 - protein, 20 aa, Secale cereale
PQQPFPQQPEQIIPQQPQQP

SEQ ID NO: 5118 - protein, 20 aa, Secale cereale
FPQQPQQPFPQPQQQLPLQP

SEQ ID NO: 5119 - protein, 20 aa, Secale cereale
SPQPQQPYPQQPFPQQPQQP

SEQ ID NO: 5120 - protein, 20 aa, Secale cereale
QQPQQPFPLQPQQPVPQQPQ

SEQ ID NO: 5121 - protein, 20 aa, Secale cereale
QPQQIIPQQPQQPFPLQPQQ

SEQ ID NO: 5122 - protein, 20 aa, Secale cereale
PQQPFPQQPEQIIPQQPQQP

SEQ ID NO: 5123 - protein, 20 aa, Secale cereale
QTQQSIPQPQQPFPQPQQPF

SEQ ID NO: 5124 - protein, 20 aa, Secale cereale
QQPFLLQPQQPFSQPQQPFL

SEQ ID NO: 5125 - protein, 20 aa, Secale cereale
QQPQQPFPLQPQQPVPQQPQ

SEQ ID NO: 5126 - protein, 20 aa, Secale cereale
EQIISQQPFPLQPQQPFSQP

SEQ ID NO: 5127 - protein, 20 aa, Secale cereale
NMQVGPSGQVEWPQQQPLPQ

SEQ ID NO: 5128 - protein, 20 aa, Secale cereale
PQQLFPLPQQPFPQPQQPFP

SEQ ID NO: 5129 - protein, 20 aa, Secale cereale
PQTQQPQQPFPQPQQPQQLF

SEQ ID NO: 5130 - protein, 20 aa, Secale cereale
SPQQPQLPFPQPQQPFVVVV

SEQ ID NO: 5131 - protein, 20 aa, Secale cereale
FPQQPEQIISQQPQQPFPLQ

SEQ ID NO: 5132 - protein, 20 aa, Secale cereale
PAPIQPQQPFPQQPQQPFPQ

SEQ ID NO: 5133 - protein, 20 aa, Secale cereale
PQEPQQLFPQSQQPQQPFPQ

SEQ ID NO: 5134 - protein, 20 aa, Secale cereale
SPQPQQPYPQQPFPQQPQQP

SEQ ID NO: 5135 - protein, 20 aa, Secale cereale
PTPIQPQQPFPQRPQQPFPQ

SEQ ID NO: 5136 - protein, 15 aa, synthetic construct
  REGION 1..15: note = NPL033
LQPFPQPELPYPQPQ

SEQ ID NO: 5137 - protein, 14 aa, synthetic construct
  REGION 1..14: note = NPL038
QPFPQPEQPFPWQP

SEQ ID NO: 5138 - protein, 15 aa, synthetic construct
  REGION 1..15: note = NPL034
PEQPIPEQPQPYPQQ

SEQ ID NO: 5139 - protein, 16 aa, synthetic construct
  REGION 1..16: note = gluten derived peptide
PQQPFPQPEQPFPWQP

SEQ ID NO: 5140 - protein, 16 aa, synthetic construct
  REGION 1..16: note = gluten derived peptide
FPEQPIPEQPQPYPQQ

SEQ ID NO: 5141 - protein, 7 aa, synthetic construct
  REGION 1..7: note = Synthetic
GAVVRGA

SEQ ID NO: 5142 - protein, 13 aa, synthetic construct
  REGION 1..13: note = Synthetic
HSLGKWLGHPDFK

SEQ ID NO: 5143 - protein, 14 aa, synthetic construct
  REGION 1..14: note = Synthetic
NTWTTSQSIAFPSK

SEQ ID NO: 5144 - protein, 15 aa, synthetic construct
  REGION 1..15: note = Synthetic
DEGGYTCFFRDHSYQ

SEQ ID NO: 5145 - protein, 17 aa, synthetic construct
  REGION 1..17: note = Synthetic
ISQAVHAAHAEINEAGR

SEQ ID NO: 5146 - protein, 15 aa, synthetic construct
  REGION 1..15: note = Synthetic
DYEYLINVIHAFQYV

SEQ ID NO: 5147 - protein, 18 aa, synthetic construct
  REGION 1..18: note = synthetic
SASVRIRYKKMKVFCPRP

SEQ ID NO: 5148 - protein, 15 aa, synthetic construct
  REGION 1..15: note = Synthetic
WTSQEAFSHIRIPLP

SEQ ID NO: 5149 - protein, 98 aa, synthetic construct
  REGION 1..98: note = Synthetic
GAVVRGAHSLGKWLGHPDKFGAVVRGANTWTTSQSIAFPSKGAVVRGADEGGYTCFFRDHSYQGAVVRGAVHFFKNIVTPRTPPPSQGKGRGAVVRGA

SEQ ID NO: 5150 - protein, 100 aa, synthetic construct
  REGION 1..100: note = Synthetic
GAVVRGAISQAVHAAHAEINEAGRGAVVRGADYEYLINVIHAFQYVGAVVRGASASVRIRYKKMKVFCPRPGAVVRGAWTSQEAFSHIRIPLPGAVVRGA
